United States Patent Application Publication US 2026/0275333 A1 - sequence listing, part 20

SEQ ID NO: 3045 - RNA, 64444167 nt, Homo sapiens (residues 40,814,642-42,962,780 of 64,444,167)
  source 1..64444167: mol_type = mRNA
gcctcatggggctgcagtgtgggaggatgaaatggaacaaagcaagtcacgtgctgagcacagggtttgcacatgcccaattcaaatcatgggtccctgaggccagctgcagtgtggagggccagctgtgctatcacagtcattgtccagcccccactcatgaacctcaccaccctaaccctaacaaaggccaataggagccatggctcagcccctcatcccctgggggcttcatgggtctgaaacagccccatctcagagctcttcaagcttggatcctggatttcacttacaggggaaccacgaaggaacaacaagatgcagtaaaacccctacttctgggggcccgtggagggaggaggtggaggctggagatggcactggacagggttgccggataaagaaaaaaaggaaaaaaaaatacagggtgtccagttaaatttgtatttcagataaatagcaaattactgtttagtgtatgttccatgcaatctttgagacatacttatgctaaacaatgattcatctgaaatccaaattaattgggcattatatattttctctagcaaacctaagtggaatgtctgtacacgctggagctgggagagtacacagggctcccttgaaccccctggacatgggcaaccagccatggatgggctggagagaggactagtaatctctccctccttgtgccagccctaggagctcagcccaggcccactccctaccccacaaaccctccatcagagccaagtggaaaaggactctggcccagctcgctgcacccccagatcccttcagattgttggttcctgggactgggaggagcccagcttccacctgcaggccagcgtggcaatcagagccatgacagaggaagcgtggaagttcatgaaatgttgcctccttgtccccctctgcctctccccacctctatggcaaactcttctggccttgagtcccttaatggagcatccctaaaggcagctaggagcacaggccccacagagcccctttggggctcaccatcctatatatctgcaggcctacacagaagggacccacaaaagcaaaggatgatccgttccatgaactatgaaaacttcagtgctgaggggtctcaggggaagacaaaagctgccccctacttccccccaggcagggctttccaggcctcccagcctctggttccagattagtcatagccaaagggcatgagacgtgaagccaggggagtcaagcgaatgccgtggctgaagccagacggtgatgtcaggccagggtagggaggctcagggtgggcttcccctggatgtgtctgtgaggtggtgggcaggggctgcttaggcaaaagtctcccaaggggggccacaccacagtcagcccaaactagtcctccacagacacaaactgaagagcctgggacctctccataggggagccctgtcctgggcccaggaggggctgctgaagtttatttactatgtcttgtaccccgcagagtctagcacaggatttcatttggcaagcacttattacatgctgagcactgttttaaggatttgacaaatatccactcattcgttttcctaacaactgctggtggctctcctcttgccccactcccatcctgcacccagctctagtttctgaccttctctgccgtgttccatgttctgtgcaagggaagctgacctctacctgctgcatcaccccccactccctcacccccagctgtagtttgggttctgggagcccaccagttgtgactctagccatgactgcatttctctgtggctgcatatctgaatggggcatggaggaggggttccaagactccactctcataggcctcctgaaacaacctttccttcccttgccccttcagtctggcaggaggagggggtcatcgttttctgctcttgctaaccgaggtatgcctcaccatccctttctgtttccttaatttgccttaatttgaaaattgtccctttataatgttctttttagagaaatccttttggatgtgccatttgtttcctgccaaaatcctgactgatctaagaatcctatgagagaggttaccattatcacccccattgagaagatgagaaactcagacacaaagagttcagtaactcacccaagagcacaccaagaggtgaccactcctggtcacctaaagcccagtttcttctccccacactcccttggaaccctcttcacacaggctttgtccctagactccttgggtccctgtctcactccaaagggctgggcttccagctgtcaggttcagaccttatcggatcattgaataaatgagagcccaatccctggagcaggaaaggcttggaagataagatgccactaccttatggagctaggatagtgcaggcccatgcccccagcctcagaatgaggatcataatgcctatgaccaagctggagtctaagagagtcttgtgaaaggcctggccagccacatggtgattcttaaccattattttaaatcagtagttctcaactagggcagttttgctccctggaagacatttggcaaggtctagagacattttttattatcaaaactggggagagaagatgctactggcatctaatggatagaggccaaggatgctgctaaacatcctaccatgtacaggacagtcctccacaaggaattatcccacctgaaacgccaacagtgccaagattgagaaacttaggttacagaatctcaggactcatagagaacatttgttctattacatctattatagatgaagatactgaggacccaagaaggcctcaaagtcactgccaggttagaaatagccagtatccaagtccaagtccatatttacctccagagtctggtacagcacagagcaggtgcttggcttgacccagcatctggctgcttctagaaggtcctcagcttgtcatcagctgcctcccccaaccaggacaaggtgagatctggatgtgggtcctagggactttcttcccctggaagatctgaatgagtccagagagctttccttcggtaacctctcccctcccttcaagagctcttatcaagagcacacacactttcaggcatagcctgagctgtggctacttggttaatagccacaagctcatccataggccagttggcctcaaagggatccccttgcaaagccctgaatttattctgacagtgctgccagtggccttcggagttttacaggaggccttgtcaagggcaaacattgatcctttgagaggtgatgtgcctttggaaacagcttctggcatctagtatggtaagctcaatggagtacagactagatcagtccttctcagaaaagttctaagaaggagccatatatggaggtgaaggttttgtgaagtggttttggaggagctgatagggacctagggtcacctctggctgggaccacaggcacaagatcccatgctagggatagggccagagaaccaagagtggaatggggactcagataagcagagcctttactcattggccagaagcagagtgtgccaaagaccagcccccaaaccacccactcaatggaaaggagaggccagatatctgtggctcagcctgtggccaagagtaaggcgagaatctaaaggacagttgaacctttgggggccatccagcatccattctcctttctttgaataatgacatcaaaggattgcctttcagggaagtgtgtaagaagtgaaatcaaaggccaagaagtctttaatgaagggactacttgcagaggtgcagacagtgttaaggaaacaaacactggcccaaaactagccctagtggcaagaagttaccacctgtattagtccattttcatactgctatgaagaaatgcccaagacaatcatggcagaaggcaaaagaggagcaaaggcacatcttacatggtggcaggaaagagagcatgtacagggaaaccacccttttataaaaccatcagatcttgtgagacttattcactatcaagagaacagcaagggaaaaacccacccccatgattcaattacctcccaccaggtacttcccatgatacatagaaattacaggagcttcaattcaagatgagatttgaatgggacacagccaaaccatagcaccaaccttaggtctgaagggagaaatgcgactatggagagagcctgtccagcgggacacagagtcagatggggtcaatgactctagaactagtgtaacaccaagcaggaagggagtagggaatagagatcccatcctctctcctcttccaccctctgatctcctgccaatacctcccattggccaaactcaatgggaagccacagggcaagtccaagggtgagtcttttggggtacagagaatggcagagaaacaaactaggaagaaggggaggaaaaatgaagaatgagcagcacatctgtcctctttgactgacagatgggcagtaatcctaaatgaggctaattagaccttgctcctccatgatttttaatcccagccaataagacagaagaacagtggggtgggaggtgggaaataatcaatttattcccatagcagtgcccacactacagtccacagactgggtatggtgaaaggatgccagccaaaaactctcatcctgtcctatccattctccaccttcagtaccaagtggagcttgccatgagtgagagatgtcttggagcagctcccagtgatggctttataacagggctgcttggacaccttaaatcacactaatgaaccatgagaaccccctgcatggggtgctggcaggagaccacaccattgcaatggcaagaggggagacctttttattaggtttccccagaaactactcgataaatgcttttagcatcttttttaaataaaaaagaaatgaaatgtaaggggcatattagcgctgctcccattttcaattagtccaaatgatcatgttaaaagctattaataaaccaccgcaagtggaggtcactggtggaggagttcatcagggaggaattggcagcccacaatggagtcttacgcactgctgaggtctctcctcacccactttgcctcaaaagcctctgccatgagacccactacattcccacgatgtagggaaaggcagaaccacagactggaaaaatctgctaagatctgagcaccatgcctgctcaggtctgcaaagacacaagaccctggttggaagttaaataattggctgattctatcagttttatcaggctcaggtcatcctttgtggtcctacacagtctgtgctgaaaaggatcctagggattttgcccctcatggggaaatgtggcttgattgattagtgatgtctgccagggcaatgacttagaaggtggtggcatgcttgtcctgtatccaccatgcctgcctaaacctggtaggagaggaactcccagcaaatggacaaatggactccctttggtccatttgctgtccaaaggccagcccccaaaccacccactcaatggaaaggagaggacagattccaactatgctcaagtgagccaaactcttcctacctgcctcctttcgtccagagccttgcttctgggcagatagggcccacgggacagggacctggattcaacatttcttctcaaagcacatctgagcacaaagactcagttttattgttcccagctatgccagaactaagataagggatgggatctttttatcctttgtctcagagactttcaggccaggattggtactaacgttctctggtctccactggtatcacagtctgagccccgtcttccctgactcaggcaagggctctccatgtttccttgtctcagaatggtctccacagagcacagccctggccctgagcctctcctgctcctgctgaagacctcccatggttctccagtgtctccacataaagttcccctcccagcctcacctctagtctctccccatgttcaccacgccttccagtcactgcactccctgtgttctctgacagtggtgtgcgtggagacacctccaagcccttcacttggaacaaccctgtcccctccaccccgacagctaactcctgcttatccttgaaggtccaactcaagagatgacctgctcccccatgaccactgtgatcccctaagtcggcacaagctgctatctgggcttccaaagccccttgtacctggatcctcattgtccatttgcagatcttccccacatgactgtggtgaacgacacagaccacaccatctgacacaaaaagggcagtaaattcccccactggatcccagaggcaaggcctacaccgaccctcaccccctgtctcccacacccacccagctggggacccaacaagaagggacaccaaagggaccctaatggttcaaagggaggtttcagaggtctccctaactgggaccacaggggcattttacctgttgtcctttggctacacccctaaaaaggaagaagtcacccctgtggtctggactcaagctccacagtccccacaccctcttctccatcactcactctacttgtcagaacagaaagctgattccaaagctgagagaagagctgcccatgggccagagcctggggactaagatggaagtagatggccaagcagtgtggcccccaagaaggacccagcctgagatggacaagagccccattcctggttcctaacaactcccactcccaccccatgattgatggtgagcagatgcatcctgccccctcccctctcctcctgtggaggtttttttgttaggttttgctaaagcaacctgcaaattaatttaatatcctcctttggttgggagctatgaagctgggctcgaggctgatgatgcatgaaccatcggtggcaagtatttaatctctggacaatggatagagatgttagtgcatgccacactaaattctatttacgctgcctattaaaggcagtcaagctgaagggaatcggtgcacattacaggccctaatgggagaggaagctccacaacagtacattaaaggcggaaaatgaattaggaggggactgtggaggagaaagcaggcaggccgaggggcggcctggatataactcttcctgacagcctagcacacatgcccagccccactgttcagatttgctgagaagagaggctccagtggccctcccaaagaccttgactgtgggtaccacccaacctacatgggagttcctgtcctgcaggtgaagaaagaaaaggggttggaatgatctcaggctaccaagccagcctccttgcactctctaggtgggtccatctgaaggcctggggcattcttcatctccacaggctcaccagtacttctggtccttctacaggcaggaggaagctggcaatgaccagagggagtgggtctgtgtgctgttgctgctatcacattattgggcagaccttgggaacagtggttacagtacaggggattacggctacagagactttgggcaagccatgtaatctctttaagccccaacttcttccactgaagagccataataacgtatacttattaataatgtgtcacgagggcttaagtctccctgggtttacacagatcctaagtcctcctcttttctgtctttctcccctacagtgtcttgtcccttcagagcccagcatatggctgtgcacagagagggcatcgtcccatgcttgcttgttaaagagagcatttgcctaaggtcacccagcaggtaagcatctcaaccagcattagcaccagatccatctgactctcatcacacctccctccccaacacccttctcctaagcaggtgattcctggggtagttgggaaaatctgagcaaatgttttgccttcaaagccagacggcagagtctggggtctgcagggggtccccagcttcctgcttcctgcaaagtagagtgtggagcacaattaagcagccatagatgtgggacttcagaaagaagtgatgccagtcagaggatggtattgctgggctatacaattgggaaggggaatcaggacaagatggcacaagcttcatctagcagggtgaaatgttaacagagtaccctcgtaggaaggtgtccatggtcacccaagccctgcacccccagcacctgcaaaatctcaagaaggacctggggtactgggaagaggactaatggcagccttggggaactacccaaactaccagaaatggatgtctaagttgttgccttcagaacaagtcccagctccttaaatcatctgtgggccttaccgtcaggcctgccacatgtctcacccctctattacttgactctatgtgccaataatactgaacaactcagagcttccagaatacaatctgccatttcacatcttgcctcttcattcactgtttcctctatttgaaacactttaccccacatctcctggcctattcctagttgtccactaggactccactatctcctctaagtcttccatgaaccccaggggcccaccgtgtattctgctacagtaccttgtactacctccatcatagcacttagtgtattatgtgattaaagtcaaggtacatctccctggttcattctatgtttccagctcctaacatgagacaggcacttggtaaggcccagtgaatatttgttgaactgaaaggaaacgaccatttgttctggtcacccattctgagcagatgtactatagcccttgtcattaatttatacaacaccataaccagacataaaagcttcaggttatgtaggctattccataccactgtcactaagtagctgtacatgccatgaaatgaaaggattacatatttgccatgcttattgtgatggtgaagccaaagcagtactcagaggaaaatttgtattcttgaaagcatccattgaagaacaagaaggactaaaaataaatatctcaaaggaagtctgggtaagcatgatggactgaaaatatatatccagcttccaaaattttgtcgctattgcctttcctattctcctcgtctttgtggcttatgccctttaaaaaaatccctttgctgttgtttcactggaagtttggggaggaattagcacacctgacatggctatgcagaaaccacaagaacgtgcctttcagatctccaacttcagtgtaattgatcaactgccccaggtgctatgctctgactccaccaccgcattcactcccagcctctggctgagcacagctgagatagtaaggcaggtccgttgtcgggagacatgagaatcctttgacagatgattttagctggagactgcctcatcagctttgctgaaactttcttggaacagcgcagcattctaatagttttttctacccaatcttcctcccttccctctctcctccaaaatgttagacatgcatcatagtctgacagctctcccagcctcctccagctttctccccatttttccttcacaagtgtttttcccaataaagcttttgtgcatttaattccacgttggtgtctacttcttgaagggcccaaactgacacatatgaaataaccggatcctaacccagcagtgggagagctgagaaacaacttgattcactggaatttctgaaaggcttaggaattagaggcatccgggagcactacaaatagggagtgggagacattctcaaagaaggagaatctatcaacagtttagaaaagtacctggcacacagtagtggttatataaatgtttgatgcataaatataaacaaaattggtgtaaaatgtgtttaaaagcagtcagatcactagatgttctccccaactctttcacagggaagcaattgcccctccctcctctcagcagatgggtggagaatttttctccagggagtttaaggcaaaggaccaggcactgttgagagcagggttccttatggaacatggaatcaagtgaacattcacgcattaaatgttgacatctccccgtgattttctctcagtcaattctcaaagcattgacagccaaaattttacctacaagcaggagactaaaataatcttatctaagaatccaaccaacctaaagagattttaaaattatgacctcagacaatgctccacaggcattggtcaccctgtggggaagctcagagtcagcaagccccacccatgacagtcagctggtttatccttcctttttcaatcagaacaaacttccaaggattaacagacatctgaggaaggcccctgacccggaagatcaaaggaaatgactgcagggcagggagcaactaggaaaaacagaactatgctatttaagaaatgaagaaatgtcattccatgcatatgaaatgtctagaacagacaaagataggaagaagattggtggttgcctaggcagggtggagaggaggaaattgaggagtgacagctaaagggtacaaaattcctttttggggtgacaaaaatattccaaattgattgtggtgatgattatacaactctgtgattatactaaaaaccattgaactgcatacttacatgggtaaattccatgttgtatgaagtatatctcaataaagctgttacatatgtatatgcaaacgcacatatcttcagagagataacaaaagagatttcatgaaataaatgtaaaataatataaaaaagaacattcagcacacataaaaagatgccttagaaattctgaatgcagcagagtttaaataaaaactcaaaagaaggatccaaatataaatatactctccagaagacagagaaaaaagacaaagatgtggaaatagaaaaggaatgatgagaaaattagagaatcagtcaaagatgaccagcatccaaatgatgggagttctagaagagagagcagagacaatggaaggagaaagtcaccaaaattactcaagacaacttcccagaactgaagaatataaatttccaatgaaaaggtttgatagagaggatgaacatgttctgacactaggcatattataatgaaatgttaggaaaatgtgcaaaccctggatacaaagggaagatcctgcaagcttctagagaaaaatacaaaacaaaagagatcgaataaagagtcgaaaatcagaaatgcttcagacttctcaactagaagacaatggcacagtaggtattggttatctattgccacataacaaattaacctgaaacttagcagcttaaagtaatttttttaagaatgtatctcatacagtttctttggttctggctcagagtcttccttaaggttataattgaaatgtcagccagagttgcagccatcgaaggcttgactgggcctgatgaatccatttccaagttgcctcactcacacggccagcaagttgatattggctgtggctggatacctcagtttctcaccatgtgaacctctccaaaaggctgccaagtgtcctcatgacatggcagcaggcttctctgagaaacagtaatcctaggaaaacaagccatagtgtcagaagccacaatgtcttttgtggccattatttctacactattccattgataacccaggtcatgcctattaaatgcaggaggggactctatagggcatgaatatcagagaagagaagtattgggggctattttggaagctggttaccaaataatggctttgaaattatgaagaaaaatgaattctaaacaaaaaaagaatctactgcaagccaaatattcatcaagtgtgagaataagatagggatatttcagacatgagaagtctttaaatattttacctctcaggtacctcctcttaagacacaattacagaaggtgctccaccaaaatgagtttgtaaaacaagaaagaggaagatgagattcagaaaataagaaatataactcaggagtgaaggacagagaatttccggtgggataggggaaggaggccccaggtcaacagctgtgcgttaggcttagaaggcaaccaggccagattggagcaagccacagccactgggagggacttattcagaagaagagattgacagaatatctgatgtgtttgagtgcctggataggtgaattaggcaacaagcaagaagtttggggttaaactaatgattaacaatagcaaagcaagcttcaaaaaccaaacagacaaatactagcttcaaggaaattaaaagttgcatgggaaaagaaaagtaataatagtttactaccttgctcagctgtgaagagtgtttacacagcaataacaatataagtgttaagaattggtcttagcaaattacaatataaaattatgatacaactatactgggaggatggggtaagtgagaaggatgtagaagtgtggtaggacaggtaaaggaaagaaagctaaatcctcatcttccatggtgggaaatcaagatgtaatacctagacttgaagaaacaataagtactattgcaaacatgttttgttgaaacacagaggtaaatatcaaaatctgccaaaggtggggaaggtggttgcctctagggaaggtgaaatgtgggagaaattgctggaggggtttgtaacaaatcctgtggaacttctgaccctttaagtgcatataaaacttgaacaaaaaaaagcaaaactgaagagaaaactgaaatttccttcagaaaatgataataaactatattagaaaaaattgacaaaaataaaatttgtttgtaggcatgttctctccttataacatcctcctcaatacttcttcattttctcattttctcctccatcaaccaggctttggagtaagatagactgagattcatagtatgtcttagctgctaactagctgtgtattcatggttttggacaattctactctcttagttttagttactttatatagtaatataaggagagagaaagagagagagagactgcaaatgtctacctagaaagaatcaaatgaggtaacatttatgaaagtgcccagcatacaatatgttctcagtaaatactagcttccattctttttttaatgtagttgagagaaatgatgatgatgataatggtaatgatgatggggttggagatggggtgggatgataatgatactaagctaaaatttttgccatattatcgcatttaatcctacagaaaccctgtgaagcagaggctattattacacccattttatagatgaagacacagaggcataaggaggttaagtgagccatccaaggacataaagcccgtcacagaactgagattgaacccaaacaaacttcagattcaaggatataatcacttttaaatactgccagctttgctgtagtacaatatcttaggtatattttgctgttgatgttggcacctccagaagacaagtggccacgagggtaataactaaatgactggatggacaataaactggtgaaacaagtaaacagatcagtagagatcgtgctccactctagttatggtgcatcccagcaaccaaccctctatggactaaattgtgtacccctttccccccagaattcgtatgtcgaatccctaacccccaaagtggctatattggagatagggcctttggaaggtaattaaggttaaatgaggtcataagaatagagccctgacctgacaggattattgtccatataagaagagataccagagagctggttctgtctctctctgagtgtgcacaccaagaaaaggccaggtgagcacatggcaagaagtctgcaagccaggaagagagccctcaccagaacccaatgactccaatctcagacttccagactctaggactgtgagaaaataaatttttgttgtttaaactacccagcctatggtattctgttatggcagcccaagctgactaatacacagccaacatttttattgagctgattcaaagcaaatggccaccgaaggggcaatgtggtacaatggaaagaataacaaactccatggggagatattcaggttccaatcctggttttgagacttacgagtcgtgtggtctgataaaaatctcctggtgtgtctggaccatcattgcctctataaaaaaggaaatcctagagattaaagacacctggagtcatctacttccacatgttaaatacgaggaagcagcgataacgttaacatgcactgagagttccttctgtgcacttcacatacaaattctcacttaatgctcaccaaggtggtatgagatagccactatcataatccccatttcatagatgaggaactgaagccccaaaagagattaaataacttgactagggccatataatgagttagtggaagggaaggaattaattaaaatcacaatataagggtgccaaagtaagaaattaagactgcaatactacaggtcatatgtaggtgctctcaatgacagttccatgagagcccagccatcagccatcccagcccaggaactggaccgcagagtgcagaagccatcttgggagtactaatagattccccagcccctgccattctagttatcccagctgaggccccagagagcacagagtagagaaaagccatccttgctatgcccgttcctaatgcctaacccacaaaatctgtgtgcagaataaaatggttgttgttttacaccagtaagtatttgggtaggacacagcaatagcagccagaacagcatcccaggaaaaggggtcagcccagaccaaaaggaagtgtgccagatcctcccaggtctacctagctatagggatctcatcagtctgccatttgaagtcactttgtaaactgcaacatcacggccacagaaatgcgacaggctgtggcatcctgggctatacttctttcctcatcagagggaagcaagctgcctcaagggaagccagtactctcctggaaaccagctcaaagaactgaatttaggctccctttgatgtagacaaccctagagcatctctcaaggggtggcccaggtgagggcagcaggcatcccaaaatcaagctatggggagaagcgagggaggcacagcagctcaccttggcatgccatccctggttcctaggtctaggataaccctcacatggttcctccccactcctgccccccatcccagcctgtccctgaatcattagtgctgattttgtcgcctcatgcctccacctgactcccctcactctgctgaggaattgatgttctagaggtgcccttatgatttgcacccagtcatccccatgcccatttctctcaagacaccactccaaacctccacctctctgaagtccttccttacagccctcctcacccttgctctggggaaacaatcactttgcattttgcactccactgtactctgtccatcatagcacctcgttaatgcaattcaacaaacatatattaagcatcaactatatggcaggcacagtgctgggcactgggagcatagaaatgagtcagacagtcatgatccctgtccctgtagggagtctcacaataaacacattattacacacagtaatgtgggcacttggacgcaggtaggtcctccatgcagtcagcctaacgcaacctaatgcagcccaacacagatctgcaagggcctgggtcctctattgccctggcgaagggacttctgcaatctacacatggggagtcaaccaagcaaaggcattggaagatagatgatagggagcatagaatgtgatcctggtagaagggacatcttgttcaaagacctgaaggtttaaaaaaaaatgtgtttggttataaaaaaattaaatgaagaagaaaattggtcccaaagggtgcaattgagagtggtaagagatggggccacaggagtcagtagggtcttacagaccttggaaaggatgtttgcctttatctaaaggaaagtaaaagcccccagagaattttaagcacaggagtgacttggtcagatgtacactatagaaagaccatgcgaggtgctgtgtggagaaagaattgtagggccaagaaaggcagcaaggagatctgccgattggtttttgagttcttcctggggagagtaggtgggggtggagcagggctgctggaggaaatggagcaacatgggcaaagtcaagaggtagaaggcttgggagacaaattatctaggctttaaagatggaagagatgatggaagtgaggtctagaggaggtgaagtcaaggaagatgaaaaacagtgatggaagtttccagattggccctatgggagcatggggattatgttccagaaactcccttcaattcacttataggcattatctcttcaccagcctgggatattcccatgggcagggcctggcctagagagacagcaaagggacaaagggatgaggaagaaaagaatgcacccacggtgaggtccctgcctttgaacaccccttcttccctctcagccttcccaccatccatccgtggcctattccttcaaggacagcctctgtcgcagctgccagcagctcccatccaccagctgcagccccactgctgaaaattaagctgtagtgtttacaggacttaattagcaaaatcactcatcatcccgggagctcactgactacccagacatgacaccatttgaaataaattagcccagtgcccattgaggtcaccctcattccagtctggggtcctagcttgcccaagaccccctgacccacctctggggcctcccctgcacctccagatcccaggagcccttgcaattaatagctaattaacaaacaaaacaaacctaccaggtggaacagcagaaagacattctcagcccacaaaagcaagtaattattcggtgtgggcaggtctggaaaaaaatcacttatgagataaatcaatggctctcccccatcttgagggcctgttaggatgaaggaaggctcctcaagatcagaaaattgatttaaaggaaaaattaagcttggtccatttcccctacagctaatcacaaacgaagacattcctaaatattcatttttccaggcttgctgtagtcgcattggagatggaggtaaattgttcacttaaaaaatatttattgtgcacccaccacaaatcaagggatagagaactgggcaagacagtcatgactcctgcttccttgggtctttatattctaggggtttgaagacagacaatacacaagaaaacaaacaagatatttcagatcatgattagggctatgaagacaacaaacagggtaatgtgaggaggaggagtgggctaagggctgctttacaggtagcatgatcagggaaggttctctgaagagatgacatttaaactgagccagtcatgctaagaactggggaaagaatgtgcatggcagggggaatggctggtgcaaagaccctaaggtggaaagatgccaacagtccaaggaacagagaccagtgtaactggagcatagacaatgaagaggaaagtaggaagtaggaaacttggagagcagacagaaatgggatctggttggccttataggccaccagaaatattatgtttttattctaagtgaactgggaaactgttggagggggttaatcaagagtgacaggatacaaatgtaagtggaggggcagtgggtgctcagggcctttcgcatccctccaagtgaacccctgccccaccctggaagtccttgcatgcctcaggtaccagcctttgggaatgatggcagagcactcatttccaaaatgcatcactcttacttagctactcaaactttacagattcaacagatggagaaactgagacacaatcactaagtgagtacccatccagtatgagccaggattttacacacataatcttgcagaaacctcacaacagcccagtgaggcggtagtagtatcccaatttaacacatgaggcaactgaggaacagggaagttaagtgatttgcctaagatcccacagttggcaagtaccagagtggggattcaaacatgggcagtctgaacccagagtcaagctcttgccactacaccttacagtatccacagtgtaagttttttccctgagatttcacagcccactcaggcctggaactcaactctcctatggtcacttgcacacacctgtttgagatgaggttcccgagtgtcaggcagtccccgctgaaggatatcaggtggctgtcatagagctaaataagcaacatatacaaagtccctaacacacagtgcccagtgtgatgtctagcacttagcaggaactcaatagattttttttttaagaaaatgaacacttctatttatgttaaggtgaaattccattggctttgaagtgaggtgtgcaggggatggtaaggaagaaggaagccattcccctctggggatcggcagaacacacctactttacaaaacagaccttattttaataaaatttttaaagaaattatttgacttatttttaaacaaatatgttaattttatctgaaagtgggtcagatgaaaaataattaaaaacaaaacaaaaaaaactttaaacaggggttcttgtactatcttagaactccagtgggtcaagcaccatggtgcagtcaagtagctgccttctggagcctaccccagggcatctggagcagggccctgaacagagagctggtgtctgttccattcccatctaaaaggtgttgctggcccataagctttgagaggtggagaccatccattagggaggagagagagtggctttcccactaagctgaaagtgtcctggctgaaatcccaatggcttggtgagactcatgccaccaaagtggtcctctatggcccaaagtcagagtgaaagaagagagcccagacttccagggcttacatctgagaccagagcaaagtccaggcataagatggggcccatgtgcctggaccactgatttgcagaaaagcaggaatcttccctgcaacctggtaagatgaagaagtctgtttcgtcccctttgaaaagctcttaatcatgataggttctcagttaaattggcacatcccccacccttcctcttcccttcttacctcctcctccttctcttcaccccatctctgggctccactcccttccagaccttcccatcctgcccctccctcaatgtctccttaaaaggcctttcagggactgaaccagcagtgcctgagtcagtggcagacggcacaagaggccaccagcccgactcctctacctcgaggacactcggggactgtccccttatgcaaaacagcaggcgcctgaattcataattggacgttccaaaatgtaattatgaaagatgaaatgctcctctcaatgagaaagctgtaaatagaataattaattttctgtttgcttgaacaattctgtattatggatcttatagtggaactgaaattaattaagtgcaccaggatttatggaggaggtgaagagagagggaaaaaaggaattaatccggagtaaaagatagatgagtttggaagtgtaatgatgtgttagcctggggtattctttaacaaatttaccaggcacgttctgggtacaaaaggcatgcattgacagaattatctcaactaatacagcagctggtcaaaaattgagtaagagggaggtggacggattgggcctgtgaggtccctgaaggagctggagatgggggctaattttgagctggccaggagggggtcccaccaggaggagaaaggggcccaaccaagcagaagcttctatccccaccgcaaagcaggaaacagctgaaaggtactaggagttgcagagaggtaaaccgggagggccagaatgtgaggactaactgagggagaagctcctcagcactcctgagccccccgaccaggtatgttcattcctagcccagcaatactttcagccccatgcactcatccagtatttttccactactcttaaacctagatgggaagtgatatcacatgacttccagggccaggttgtgaaaggcaatgcttctacctgtgccattacaacccaaccaccatgctgtgaggaagcccaactagctcacacagagagaccctatgaaggagaactgacagccagcaccttctgccatacctgtgagtgattccagcccatcttccagtcttccaacagacatcatggagcagaggcaacctatccccactgtgccccatccaagttcctgattcacaaaactttgacagattataaatgagtgttgtgttttaggcccctacactttgggatgatttgttatgtagcaatatataaccagaacagggtccccacttaaccagagtggtgccctctttcatctgccctttatgtcagaatcccacatcagatttctttttttggaggaaggaggggtttgtggcttaaaaggtttgaaaacacactatcctcgtggggaaaaagtaataatacaggttgggagtcatatagaactgtgttgaatcccagctctgagcttcctggccctgtgaccttgcactgctcccaccacctctttgaacttccttctcttcacagataaaatagaggcaataacactgattgacggagttgttgggaggattttaggtacactgcgaaggtgattacttagcctgtgaagccagcaaactgtgcccagataagagtgaggctccagagtctgatgaacctgggttcaaattacagctctgtgttttcttgctgtgttatcatacacaactcacttctttggacctcagtcttgccatctgcgcaatggcaataataattgcacccagttcctagcatagtaaaggcaaagaagtgcacatagtgagtgctcaataaacaagagtttgattgatgctcacttcctctccaggagcccaaactcattaaactcccacaggcatcaaagcaactaccagtggttttcaaacgtctttctctgaacagccagacgtgtgtgcttagtggtgctctcatgaagcctgcacattccgaccctgtgtcagaggcagatgcatgggacagcagcgtggaagttctgggtagcaaatacctgtttctactctgacatctgtcctctgcaagcagtaaaatggcaaacaggaacttcagtgtgtctactccaagtgtgctccggtgctgtttgtcagatcacagcctcccaagctgcgtgatcccatacccaagccaaccaggcagagggagaccctgagctgagtttgcatctggattgcaccaaggctccaaaccacgaggcagttcctgacataccagcaccctggcccccaggtgctgagcatccctgatgcagactcccaccccccagggtggtattaagcaggcatttagatacctggcatggagaagggtgatggatggctttattaacccaccgaggtgaagccgccgacagtgaaggactcccctgtcagaggaagcattccttgcctgcaggccccctcaccagcttgcctgatagtctgagtccttgacagatgggcagctcctacgagaatgggagggcagtgtggggatgggacagtagccctccaaatgccatgcctccttccagaccctaccccataagactgactaccacaaagccacctagccctaaaggtcatgcctccaatcctcattgtctggattgtgtagttcagaaggcagcattcaccttgtattccatataaaagatgttccctggggctgcacagtgcagcagccctactggcatttctagatgacatccaccaccggcctctgtgctgtgctatgtattccacatgcactattccatcatcctctccccaaaatcttggaaaaaggtaaataatatcatgaatacccattttgtagaggaggaaactcaggctcagagaggtggaggattgactggcccaacctcacagagcaggagttgagggtcccctcaactcctcaagccccttccctgtcttagatgccatgcagaaaggaccctgcctagggtggcttccatggctcctttatcctcctctacactctggtcctcccatcatccccttctcacttttgtactgtcatggactgaactaggaaactctcttccatcagttatctgaggctgagaccaagaacgagagaggaaggttctgcccactcccacttctctaaagttcccggagagcccctccagcctccacaaccccttccatccctccatcgccctagactgaatctcctctgggctccctcagggcctgagagaactcacacctcccctccccggcctgcaccgctctcaccattgctgttgcctgggtctttttcacatttgtgtggactcctgcagcagctccaagtccccaccctaaactccacatacacgatgggagtggtccttctgtaaaatccaaactccactctgtccacacctcagatgccacaggggctctccgagccctcaacataaagcccaaacccctcaggtgtgccccagctcctgccctaacaaccccctgcattccagccatgcagacccttgggtggttcattgcacaaacctgggccactcagagccttccttccatggggaagaccctctttcctcatcatctggcacctctgctcacccttctccccactggctcctggcccccacccctgctccctatgtaagacccacagggctctctgaacttaggttcatcacactcctcaatgtgtgaggtcacttacccatgtcacctacttccccatttttctgtgagtcctacccacccaggcttatctcatagtagatgctcaattagctagagtccttatgaattagagctataattattgtttcaaataaagcttctgctgcagcagggtttgctctggagcaagctcggctggcctctaccctcccctccacatcatctcaacctaaagcctttccctccatgttccagccatgctggcctgtttttagtttcttggttctatccagttcattcccacctcagagctcagagagcacatgctctcagcctggaatgttctccatctctctttacttagctgattcctacttaccctgcatagctcaattgaaatgtcacatcctcagaaatgcctcccaccaccaccctttttaaatcacctgccttattatataggatcaggatatgctgtaatagatgaatcatgtcgcatccctgtgctttcccatgccttcccatccctttgccttatgactttgcagttcctctcattaaagaggtagagtctatttccctattgcaagctgatctttgttatccaaatcaccccttcacccagatcaaaggagagtagagaggagcattttttgcagtgttcggagatcttacattggatcaaaatgcacctcttctcactagtgtcccccacaaccacacccactcctttggctacagtttgaagtcctttgtacaaaccattctggaaatggaatagcccagtattgctttcctggcacctatacaaccaggcagggatcaacaaagaagaaagcaattccatttattccacttattcatgtatgtataaatatgctcaacaaatattttattgagtatctactaggtgccaagttccagggttacaatggtatgtggaaaagaaatgggacaccatgaagcttataacatagtggaaaaggcaggcaatgagcaaacaaggaaataaaagcaaaaaaatcagataacaaaagaaataaatttaagcaagatttttttaaaaagaagtgattgaacaggaaaaaaattccaggtaggctgcagagagaatagcaaatctacaactcactttggaagctctgtttggcagaatttttatctccataagccaaagagatagttgatttttcactcaacatatatttagagagcacctactgtgtgcctgactgctctaaatggcaatgttaaaacttaatgtccagtggcctcaagtgaggaaggaagaaaggaatataggaaaattagcatttttgaaggcttgctatgtgccagatatgagctgcacaattccatgcatgtttgttcactcgagcctcatagtactgcagggagttagtaactagagtaattcccatttttactgcagcccagggagtcatcaccacacatccaggaagtaatgcagctggaattgggacctgtgcaggtgtggttcttatccccatgtcacgctccttcctcaaccttttacaaactgaatcaaatcatccgaattaaaatcttttttattttactgggatatgagaacttaattccaagatgaatgatggacaataataatagaggcaattgctcttgagtccaaggaaccctccatgcccctctccatcacccagccaaaacctcctccatgcaacttccttcccctacaatatatagtcctcaggtatggtcaagtctagatgccttgccaagtggcccccatcaaggagccaaggcacatttttgtgttttgttttttggttttttgttttttggttttttgttttttcaagacagggtttcgctctgtcgcccaggctggagtgcagtggcatcatctcagctcactgtactctgcctcccaggctcaagtgatcctcctgcctcagctccccaagtagctgggactacaggcaagcaccaccaagcctggaaatttttttttttttttttttttttgtagagacaggatttcaccacattgcccaggctggtctcgaactcttgagctcaagtgatccacccacctcggcctcccaaagtgctagaattacaggcacaagccactgtgccctgcctcaaggcacactttctacacaacaccaccatgagtctttggggcagatattttttttcatgcaataatgtttgccataaggaaagcatgattaaaacatctttttacaaaatgcattaattcctagacaaagataaaaattccatttgacacaaatagattttccatggtgagttagccctgcattgagggtaatggatgggggagtggggggagtccagctcataaatcaacagggggatgggaagggggaaaggagttgatggaggggagaaagaggcactagtgaaatttcaacctgtgagagtgatgcccctctccattcccccagttcttaatgatctcatcaggggtccaagatcgattcccagccatgttcatctatccccttctgcattcattattttaatagcatccacataagaccacttgacatttgcatcagacaagcattaatgggaagtttgtttgggaagcttaggaattgaagagaagcaggcaccttggttgttggccaggtcagtctaaatggaacaaacttggagactggggaaatacgggaggtggaaaatgacaatcaatgattctgttcaaatcagaccaatgttactgagattccctttcatgttacagggcttcccagcccccagacctcttagtaaaccaatgaatataaaacttaggcatgtgagcctgaataaaaggatcctagatctttgagctgagtcaaaaagaccgtgattctaattcactctacagacatctcccaggtgtgcatctgagctaagtgctgtattaagcttgaggaatgcagtgtgaatgagactcaggcctgccctcaaggagttccagtctagataaataaagagcaatttcagctcagggcagcaaatgttgtgttataaataaacaggagagagagacatgctctggggctttcaagaggcagggatgcttgaggtgaaacttgaagataaataggaatttctcaagcccactgggtagatgcattttcctggcagagggaacagcacgtggaaaggcatggagcatgagatagcctgatgtgtttgggagttgaaagaacttggaagtcctggaggacacagaaccagcaaagaagtaggagagactaaagaagatggccagaacattgtgtgccaggcttcagaatgaggcttcatcctgcaggtcaaatagatggaagtggagagattcaaggaaggaagggaggcagttaggacactgtttcaacagtcctcccaggaggtgatgaggcctgagctagggtcgtggtctcaaggttagagagcaggtgtgaagtccagtggtattctggagggagatatgatggcagggcccgacctgggtgcagcactcctctgtcaccatgaggcatccagaggacaaggaaaaacagaaggaaggagggtctgaggaacaggatcaatgagcctgggcctgaaagctgggttgaaggaacaagggacttagtagatattttcgaagctccaaaaggctgttgtcttaagttgagtttccccaaaagcagaatctaagacaagaacttatatgcaagtagtttatttgggaggcgatccctgcagtgaggaatggagacagtcagagaaggatagagagccaacgcaaggtgagtgattgagctggttaccactgtgggaaattggagctcatttccacagaggactttctggagaattgtgataaggtactcagacttgtccctccaaagggtgggaggctgggcatctactcaggactcctgagggttgcccactagggatgttttctctcctacacttccagattgcacctggggaggggatcaggaagattccccaagctttagagcaagacctaaaaaaggagagctcagaaatacaggaagcatttaaaatgggaccttgtcagtgtacatgggagctcccctaccccaccatagatgcaactgaagcagaagtcagagatgggacaaaggtatgtgtcatgggacaccaatggcacctgttgcagctgtcctctggtagagggagcagacaaatcgggagtggacccagaagtagagacaagcctattcatcatcacaaccctggagaaggcagaggcagtgtcaaatcccattgtcataacacataacattatacaactaggcattcctgtaccactaatagcaaaaactataatttattgcatgtttattggctgccagttgcaggggtaagagtttgcatggattatctcatttaattctgaaacaatcttgtaagaaaagttctattatcacttccatgctatagaggaaaagaacaagggtaggatgaaatacattatttattcaaagtcctcagattaaacaggaaagaaggcaggattagaacgagttctccttaacctcaacccctgcctagtgctgctccttcagcactacttgtcccctcaatctacattggtgggacaactggcacaattaatataggtctataaattatagtgctgtataaatgcaaatttcttgattttgaaaattctactgtgattatggttatgtaaaagaatatccttgtttttagagaatgcatactgacatatttagaggcaaagtggcattatgtccacacttactgtcaaacagttcagaaaaaaatatatatgcacatacacatagataaaataaatgtggtactatgttaactttgaggaaatctgggtacagggtaaatagcaattattttaattatttttagaactttcctataaatctgacattgccaagttttcaagtttttaaaaattacctaatcttgctgggacttacctgtctcatttttcaaaagcagaataaaaacttccagtccattgcaaagagcaacaaagaaagggtcactactagcacaggaaatgcctctgaggtgcttagcaggaaagggccttggccctgaagggttttctaggtattttctcctgctcaagagcttgaattctcttggtagctgagacctgggaagcaatacctgacatctgtccctggagtggcaggaaacagagcttccagacatgcaacctctccctggacctgccaggtacagccaccaggagaatggagccttcagcccaccccttcctgctgtttcatacatgggcaatgcaacttttggaatcttgcctcctttgtatctcaaggctgcttttggcctcaaggttccctagacttgatttggaagaggataatgctgaaaattgagtggtgaaatgccaggggttgggaaaaggggcgggaggaagttattgctggagcacatcaggggtcaagatgtgggttccagccctggttccaccacttggacaattccttctgagtctcttggcctcattatccccatctgtgacaatacctatcttacagccttcctttactcactcactcacccaacagcatttactgaggaccctctgtgagctacacgctggatgagtccctgtggggagagcagtgaatgaaacaaatatggtccctccatcctggaacttaccacctagtgggagaagacaacaaaaacaagcagataagtaactgagagcattacagactgtggtaagtggtaagtgctgtggatgaaacaatggcagaagatgacaaagaataaggggtggtgatcgtacttggatgggtggtcagggaagacctctctgagaaggtgaaactttaccaagactgaaggctgagaggtgccagaggaaaggcattcttgagatcatcagcaatggtttgtaaatggtcatgagattagtgccttccctcttccttcctccttccttctcaccttcacccaatgcgggcagctactcaactgaggcaagagccattttgcctgaaaagtccacagccccctgggcaggttgggctgtccctccccaggggcatccttgccttctgtcccagcacacctcaaggccctgcacacacaggggctgtgccagaattcagagagaaaaatgaaaactccctttccagatggttgcaagatgctgccagtttccagtggtgatactggggaaggtgccaagaaaactgcctccattggtgtccctctcactccacagccggggaagcctctctgaaatgtacttcaaagggactgacaggagttatgggataaataccccagctccctgaccccccaaatggaataactttgagatatgttctccactctctcagaaggcccttgtgggactgagtctcagttgccctgctggctaacactttctgtattaactttcttcccttccccatcccacccctctggtctcctctactgtttcatgagatcacatcccaatccagaatcctgtctcaaaatttgcctagggggactccaacttaggatagtgcttgataactatttagtaatctaagtgggattgtaagctactaaacttgctgatccaaggctggatcaacccctcttttagttcattgttgtaccccaacttctcacacagagcctggaacagagaagatgttccataaacatttgttgaatgagaaattgacctcacagaactaggcaagtccccacaagggcagacatcagagccaacccttctcaggatagccctggggaatatttggcccctgggcttcagacacttggcctctgaaccaaggaggccccactaagaaggccagaaagggggcactgccggcaatcacggcagtgagatggatgggcaacacggggcttcctgggctgggtgcagcttccaccctgttctgctctgcagaggagcccggctctgctgggcacagctcaccatggcgagtatgcaaacaaccacagcacaggggccatttcagttagttcaggaaaggtacaagagcatgacaaatatatgtaatttgtaaattggccagtcttttgcaataatttagaggctctagttaggagcaatagaaaccccccaattactgatgtttaaggctggcactgttgctggctgaatatttcatgcataaatgaacttccactaggccacccgctgcttctgatgaggctcttgtgggctttattgcccggcgcccagcagggtcccgccaatgggccccatgacggatgatgcatcgttttgcagcttaaataatgcagtgtggaacaggctcagtgctggtgcactttatttacatatcaattgagtggccactctgaatatgaagaaatatgagaggggaagtggctggcactgaatatttcatggccatgagccccacaggaagcgaatgtccccagcccagagttaggtctggccatgtgtgtaagagagaactggcattaatagtccaggagacgaggcaagaataatcccccaagccaggaggggagccactaactggaattgatgagccccctatcatctggacacagcctgctggtgctttttcaagtcagcaaaatatctgcttcctgcctgtaccttctggttcccagaaacttctgcagagaagggagtttgttcaagccatcacacgctgactttccaagtcatgtggatggaacagaagttagtatgcagtggaaaacagcatagtccatcgagaaagggccccatcctttctgagaatttgctggaagatgaatcaggaatcccagcccagccccttctcccttcaaagggactgacaggagtcattcacttaataattattttctcactggatgaggtggctcatgcctgtaatcccagcattttggaaggctgaggccagaggatcctagcattttgggaggcttgaagccaggagttcaagcccattctaggcacacagcaagacctggccatctatacaataaaaatttttaaatgatctggcacagtggcgcatgcctgtagtttcagctacttgggaggctcaggaggaaggatagcttaagcccaggagttcaaggctacagtgagctaggattgtgccctgcactccagcctgggtgacacagtgagaccctgtctcaaaaaaaaaaaaattatcttctgatcctctgccatgtgctaggcttctagctaagtaatgaggatacaactatgaaaaagacacagcccccatcttcatataccttccagttgagtgagaaaaaaaaagaaaagaaaatggggaaccgtaatgattgggtgtactaggtgtttacgactgcttaacaaactaccccaaaacttagcagcttaaaacaatagacacagcctcaaacacagttcctgcgagtcaggaatttagaagcgatataactgcgtgatttttgcttgggaattctcataaggttgcagtcagtatatcggccagggctgctgtcttccaaaggctatactgagctgatggatcccactccaaagcagtttactcacatgtgtggaaagatgctgtgggttgttggcagaaggcctcagttcctcaccatactgacctctccatagagctgcttgagttccctcacaatatggcagctgacttttccaagcaaattatccaagagaaagaagtggaagcagcaatgtcttttatgacctacccacagaaggcacaatccatcacttcattcgcattttgtttgtcacatggataaacccaataaatataggagggcactacaaagcatgactacaggagcaggaatcattggggaccatcttggaggatgggtacacatgcggcaagtagaggtgtaaggaggggcagctggtctggtataagggaacctaggaaggcatccttgaggaaatgatatctgattagagatgaaaaaataaaactatctcagcaaagaggaagagggaagagtgttcagcagagggaacaacctgtgcaatggccctgagcttggtgcatgggaagccaggcaactaaaacacagggttccatttggctagagcttagaaggggctttgaataccaggcttcatcctgagggcactggggagcctttggagggtgaaaggagaagatagccctgtgggtgtggtgggcctcaagtctgttacatcccttcaatagtgggcgagtctgggtaggtttgagataatgctctggagagatgaaaacagaaccccaagtgagccctgggatatactgtactctagagaggattcagtttagggttagagttaagttaatgttagagtcagagctagagaactggagagaggtcaccagaggcagcagatctgtctcaaaggtcagccccccactcacttgctggcttatatgatcttgggcaaatcacttaccctccatgggtaacaatcagtgggcctccattttctcatctgtaaagtaagaataatagtagcaccagcctcataaggttgttgggggtgttgactgagaaaagacatctgacacatgtatccactcagtaaagtctagtgcagtgaatgaggcctccatctgtgtcaaagatcttctctccaggacctgggatcccttcacccccttcttactacaaaccttctcccctacttttcaacactacctgagattctgctcctgagggtcttactgcctccaccacattggaagccccaaggagtgggcaaagccagactcattccccgcttgtggatggaccatccctctgacagcgcagtgctaaacccggtgagttttctgactccaccattctcattcccatcatgctgtcattttcattcctagaaattattacaacttgtatattttatttagctagttgtgtactttataggttttgttgttgttgttttgtattgctttatattttcttcttgctctttttcccccagaatgaacactctatgaggtcaggaactgcctgccttctttacttctgtagctccagcaccagcacagcacttgacaataaaacccagcagataaaagcaaagagtctgggccaggcttcctgggtctgaatcccagagctggtgctatctaactgtagagagacaatttggacaacacagtgtctcagttttcccctctgtaaatggggccaataatagtagcgatcccatggctgggcgcagtggctcacacctgtaatcccagcactttgggaggccgagacaggtggatcacttgagttccagaccagctggccaacatggtgaaaccccatctctactaaaaatacaaaaattagccaggtgtggtggcaagcgcatgtaatcccagttactcgggaggctgaggcaggagaagcagtagaacctgcaaggcggaggttgcagtgagccaaaataacgccattgcactccggcttgggcaacaaaagtgaaattctgtctcaaaaaaaaaaaagtagcaatctcattaggaggattaaatggtactatgggtaaagcactcaagaacagtgctggaacataggaagtgctatataagggtttgttttatacgtagatataggtagatgtagctagagataaaatggtaggtgttcaagaaatatttgccaaattaatatgctaagtctaggaacgggacaaagtcctaactggggcagagcctcagatagggacaatgacactcccaagggtaagttccttgatctgaacagagaaaaacttggaaagcttggaagccagaggcagctgggaagggcagctgtaagcaaaggcctggtggggtggggcaggggccacaagagaccctccatggaacccccacctggaatagccagaccgagtactaacacacactgaacagctaaatcatacattattgatttgtcaaacgtatttgcatataaataagcatgatcattcatggaggcccgagcagtggcacctcccctcagtgccatgattacagatggatggccctagttagacacgaaccagggacgctgctacccctgccgcaaagtcagcggctgatttaaaactacatttattggagcatgtaagtgtgacagcctagtggtgagtttgggataattagtctaaaagacaagataaacgactcctaaaactggtattgtgacgaagatcccaccctacccccccgccacagccagctcagccctgatgccaaaaatacagccgaagataattaactaggaaatgttaacaggcaggattatgttccaattgcattttccagaggactttagaattttacacccaagttgattgtgttcccctccccctggtgattaggcaggagaggcggattcttagctagaagcagaggctgggtggggtgggcagacaggcccagacaaggtctctaaggccaggcaagcaggtggctccagtcagccttccccgagcctgaaccgagatggatctgctgggtgaagcacgttgacccgggtaaattatatctgccatgttaattcattccacgtgggagatcagccatgagctcagaggctggcatcggctgcctctgatggatcaagggacccagctgctcagacacaatgctagagacttgtcattgcgggggaaacacggcttgctaatgctttattttaattgtcctaaattacacttgaagatgcacagcccaggaggccagccagcaaatatcaaacgttaccttgaggatctgcttggcctagagaggaatctgcagtcctaggactggggcctcaccgctttgctgatacagaagagagagccactgccttttggtttcaccacctgcctccctgctcccaaggaaggggtagagaatgccctgagacctctgacgcatcctatccataggtttgagggttccttctctgagagttaagtctaatggacctagacagaaagaggggggtgggcctttggagtttgtttgaggcaatcaaagaagaatctaaaaggaaggcagcacagcagaggaagccatggcagaagatgtcctcgtcctaatccccaaaaccgtacatgacaaaggggactctgtagatatgattaaagatattgagatggggggagtgagtgagagtgattgcaatgtcattgcaaggtccttagaagagggccagggagagagatgaaaatgctattagtcagctggcattgaagatggcactgaaggtgcaggtgggctccagaagctggaaaaggcaagaaaacaaagggtgcagccctgccaacaccatgaaacaaatccaggaagacctattctgactgctgatctccagactgtaagattataaatttgcattgttttaagccacttagcaatttgtcacagcagcaataggaaactaacatggaatctcattgttctcagcctggcctcaccacatcctggctgtgtgactttgggtaagtggctgaacttctctcagccccaatttccacatctgtaaaatgaggattatagaagaacctaatttgtggggccattgtgaatattaaatgagctaatgcctggaaagtgctgagctcactgctcagcatatagcaagagctcagtaagtagcacttactgtcgtggctgtcgttgtcgttattgccccttgctgctctttctgagaccctgcagtgaggataaaattagtaagataatacacatcaccaaactaaaagtttctttattcatctagtatttattgatcgtcttctatatgaaaactattctatcaggtattaggaataaaatagtgaacaaaaagggacttagcccctgccttcatggagtttataatattgtaggggagatggaccttatcatataattatattatgaataaaatataatgttatatgttatatttatattgaataatctcccaaacaagtgctaagattgagagatgctaaataaatacatatggagagatgtgtctcatcagggaattcatggaaagcttcctggaggaaactgacctcaaaagtttgagtagagttagtgctttgagaagacaagggtgtgggaggaaggactctgcctacatgtctggagtcatgatccagcttctggggtatctgggaggagtttagtccaaatagaatgcctgcagatgcccacgatggcaagtcctgggaaggtagaatggccctcgccacaggcagtccaaatagaggtggcatgatcaagtgtggccttgagctgtataaggtgagtctatcccttaggtgctgaatccctgtgtgattccgaataccaggctggaaatatcacctcgtaccttgtatgtgggccctgaccgtgaatgcaggggtatattctgcccttcatcagtccaaagcaagacacatggcatagtctagttcaatggagcaggtaagtatacctctctcatggacatggaaaggagggagggaagaaggaaatattttcctgaccaccgtgtaatctatcacatgccttaaaattctgcctgggcatagtggagtactcctccctccttgggatagacgggaaggtctaaggaccactcctcattcatgcacaagattctaggcctcggacctccactctgtgtatctatcagcctttctgcataccacatcatttagataatgactcaggattagccagatcccaaatcccctggtcagtgcttgtttctaggtgtggatgttcaccacctaaaaacctaggcctaagctggactgccaggcacatagcagctatgcaagaatgatttgttgagtaaatgaatgaatgcatgaatgaatgaacaaatgcccagcccaccccttggacatcattcgttggtttatttgatgccttctatctatcagacctccatttctgctgtacacgcagcttgggcagagatattgtgacataatgtaaaacccacccaccccagacaatgactgtgcaagctccagaccctttctttctcggctttcacaacagtggccacggcgttggcagaaattccaaaacagcctacaaaatgtggatgtgggagaccatatccccagaatgttttgcaaaaagcaaatattgtgacaaacaattggaaacatggtacatttatctgcacttgcagtagctgctcatatgttcacattaaaacagttgaaaatgtataattaaaaatctgtttcaaaatgcaaagaacatgtaaaaatagtttatccattcacagattaaaaacaaaaacaaataagtgtgagtcatgaaaaaaaaaaagaaagaaagaaagaaaagaaagcaaactccaacaggatgcaggccccaatgaatggcggctgaaacaagtctcacagtatacatatgccccatcacccccagtacagaaaccaggggatctgagttgaacctgtatccttttcaatttgcataatttgatgctttagtttctctatgtgagaggagttgtgggaaagaatagtaagtgaatatcgggtaaaaagtcctctgcacagagctcaagacctagatgaggcacacggatccaaccttctagcagtagatacagacaagcatcatggggaaagcagatattaaattaaaagcatttttacaacatctccacctcccagactgctaaaattaggcttatctttggcaattctgattctctttctctcttgccatcagagggaggttctgagtctgcctgtaatttccctggcattttttttttttacttacatttgggaaggaaggaaacaccacttaagagaaaaagaaggacttgagagagaaaggggagtaactagaaagccaagagccatgagtggtttggccttgagagaattttagttgggagttaattataagagaaacaaagagaagcctctaggcagctatggagggaaggagaagttaaaatccagagaaatgaggaaagaaaatcttaatgttactgtgaattatgatttggatcttctttgacattctttaagagataccaataaaagatttaaattgctctaaattcctttgattgctgtatgtgattctttgaatatgacaccatgctggcactggaccacatggggccttggttttatttgggttacatgagtaaatatgcatttaatctaccctgtgaaacacgctctgacagaggtgtggacacagtgctttgagaatatgagaataagggagtcccagaagagaaaagaaggtttcccagaggaagtcatgtttgagttgaatgcaaaggaatatgttcaccttataggcatgaattgcaagggcatttctggtagaagaaataatatctgcaaagaaacagagtattcgggagaaagtgaaaagtctagtggggtgaagaagaaaccagaaagctctgtgggtagacaggagctgtatggtgaaagggctcaaatgccattagcagaatggcctttattctgtaatccacaggcctttattctgtagtcatggttttgagtgtggacgtgacatgttagaggttttacattcatttaacactcttgccagagacactggacccctaaagcagcctgacctcttctgaatcccatccccaggagtcaccaggagaaatggaatcaagagtggagctgactccagaggttacaaaggcactggcaagaagttcacagttcccattgaagagaaagacgcactgaggaaaataacgaagccatttgtcatcatctgaattcatgtgcgggaaacacatttgtttccaaggagcgtgttccacaaacttgtttaaatggaaatggacttgatttcaacagcaatgcagccttggtggcaatatgatgttttattttattgtttgcaattagtgacaagtgaggaaaatatccaaatcactccacatcgcacagggtgtgtgttatccaagtactcagctctgatgagaggatgggggctggggagatgtaaccatgaagaacttgaacctccagagaggaaactgaatgaagtgcgtggagtcttcaagctcttaaccagtgcagaggcattattgaaagacaggaagtacagctgacttttgggatgtagagaaaaccagtgaaggaaatttcccccaaagacaggacaagccaggagtcaagggaacccagatcagctgcaacacaggaggagctttgggaagaaatttcctatggtttgaaaaagagagacctctgacttctccattcaccagctggtaaaaaggccagtggtcactgtccagtattgcctaaggcagagttcctcagcctcaacactattggcatttaggtttggataattctgtgtgaggggtgctatactgtgcattgaaggatatttatcaaaggacattttggcctctacccactagatgctagtagcactcctctccagttttaacaatcaaaaatgtctccagacactgcaaatgttcccagaggaacaaaccacctcccactgagacgctctggcttgacttcaattaccagttctgaatcttggttgagttggaagaggagtccaggattttcaagagaaagttttgtccagcttagaaatgcttcattctgaggaatctgaagatcctcagcctacctcaacaaagcccaccattgccttcccaaaatggacctggggagcaggagagctcattgtcccttaactttgatctgcccaggacttcaagaaaaactaaagaaaaactatgagatgccatggggccatggaatgagcctggacttacagttctataggcctgggtttgagcccaagctcctcactttgtcacacgtggtctgtcctttgctgacctggacactccccttctctccatgctctagccacactggtctgctgaaaactcctcatatatctcccatccaagtattaaatcaggcctgaccctgcctagcttccaaaatcagacaagatcaggtgtgttcagggcggtatggctgtaggcttctcatacatctcacgtgccacctcaagacgtttgcacatgctgttacctctatctagaatactcccctctcccctattccccacactagacacacacacacacacacaaacatacacacaaaaacacaccctagctcattcactgtactcattcttcaggtctcagattaaatgttacctcctcacagaagctttccctgattccctggacaattcggtacccatgatacacactgcacctgtactattcacgattaaagaactattggtggggggaaaagttgagggaatttgggggaaagagaaaaagaagtaagcctaagagaacctgcccaagaaagagcaaaggaaataactccactttaaattttaaaaccatagagattaaaagacagatcagcggcaacaggaaggtttttccttgttgtctggcatctgtgtatgttcataactgctttccttctggtatggaaatagacctgcctaaccttccagatgcgaaagggggatggcatctgcataatcttatttcatgcttgtatcagccccaagtgataggggccataatattcccattttacaaatggagaaactgagacctcagtctgtactctcattcggaatgtatgtaatcttcccagaactgtatcactcatgagctgaaatttggatccaggtgcatgaagttccagagcctgtgctcctggccacctatagtgtgagcccaatgaacctggcagccaggagggaattggcccaatgctgggctggggcacgaaggtgactttcaataaatatttactgaatgagcagaggcagcagtgggattcacttcggggaaagttgaatccagcctgtgtgcagcggagctcaacccccgcctaccccaccccaccaccaccgccccacccccgctcacttatcaccatgtaattgaaataatgcctatcgacagaaactcacaaacaactgctcaattttcctcaaaattcaattaaacttcgtttattctggggatcgatccaattaaaagaaggaaaatttcagatggtctgagcaacaccatccatcttcaaacacagtgtctaccccagtgatgtaataatttgcccaatcaatgctttaaaagcatttagcagtcttgataatgaacttttgtcaaaatagccttgcagagcaataagtgcctgcagattaatatgaagtcataaagggctaatgccttggggtggaagggggatgacgacatgaatcagtgggagctgtgggctggggcatcatccttccacaccttctcagaactaggtatgagcagttagcaggacccagaaaatgctgaatgtacttccttgtttctgctctgtctgcaggttcctctcccctccacagtctcaagacccagactccaccagccaggtcctgtgatgctcagatcaccctcagggcatttcaggcaccccactgtattggagaaaatgtccaaagggaggaagctttgcttggaagaaagtctgcctcttggccatctaccatctctgaaagctctggcttcaaaaatggtctttgagctgcaagaactttcttttctcttaccctttttcttggggtattcaacttactagctgtgtgaccttgagcatgttacttaaggtctctgaccttttgtttcttcatctgtaaaatggtgatgatagcatttgttgaagctcagaggagggaggttgggttggatttctgggtgacaaagatgcaaagattaaaaagacccaggctttatctgtaaagactttagaggcaccaggggaaaagcaggtgaaaacaactacaaggcaagaagctagcactgttaaagatgtctgaagccagtactagaaacagtgcccaagagagggcttcaccaaggcactgcagtttgaacagcttttgaccaaagagcaggtatttgccaggtcaagaagagaaaggaaaggtgtataagctgagggggctgcaagttcagaggcccagagtcatgacaaggcttcctcaaggtgcacagaaggcccaagtcagagtcaggaaacagagaggagcaggctaagctagagctttgaaagtctcatcagctaggctaaggagcttgtcctttatccttaaagaaatagggagccacggaaggtgttaatcaagggattgatatgaggagaacagcacttggaaaagttcaatcaggcgaccttgagagggatgggctggtggggatgagacagtcagaatggtttaggtgagccatgatgtagccagggtggtggaaccacacagctccactcccctaggaattcccccaaccaccctctccccacactgaacacacccaccccaaattccctgttcccaaccagtgtccacatgcccccagacaggaagcccaggagtccctctacacaccttccttttccattccccgcaatttctagaatttcctcagaaatcttctgcctgaatgctagatcctgtttggacaaacatggtttctcatcccaaaaagttaagctcactttagtcccccacgaggcccccttcactctttcagaggaaggtcagggtacaaagttccttgcaaccagacaggggcatgcccagagttgtccatggtactggttgtgttggttccagaagaggaagggaaaggtgtttcccaagataggtcagaaaccttcatgtggagttcgaggcattcccctccaaaatcagtcacttctggggaagctgggccagtctgagctgggacggccaagatgggctgaactgggtgatatggttcggctctgtgtacccacccaaatctcatctcaaattataatcccacatgaagagggagggaccttaattcccacatgtcgaggaggggaggtgattggatcatgggggcggtttcccccatggtgttctcgtaatagtgagtgagttctcacgagagctgatggttttataaggggctcatcccctctcactctctctcctctgtctcctgccaccttgtgaagaaggcgattgcttccccttcaccttccgtcataattgtaagcttcctgaggcctccccagccatggaactgtgagccaattaaacctctttcctttacaaatcttgagtcttgggtatttctttatagcaatgtgaaaatggactaatatactgggcaagtccctgggccttgaagtggtccacaattcatcagagcctgccccgcctctctcactccagccctctaggctggggctaccttgcggggtctgtgcactgatgtggagaacaggatacagctccagcctccaacaccagcaattccttcagcatctcctccccacgcctgaactagccctttaaaaaccagaagaaaatatcaggggctggctggtgctttaaaagctggggatctgggtggccaaaggaatgaaactcctgctccactcaccggaagtcactgctcccctacgggatgccaggccctgacctgccatcacagaggctccagatttggaaagaggaggattaagaattaaaggggggagagggaagggaacttgtgctgctagatcacggggagtattaaatgatcccaagtccagaaatgccttttcaaagacttctgccattaggacttaatattaaatttactccttctgtgccttaaaaaatagctaattttttttttcaaaaggtacttttgatgccaaaggtatggcttaggctgaaaggcaccagcacatcaaacatcatttgggggatttcaaagggctgtttcagcaggatcctgttctcttcgtccccctcctcggctgatgaagtttctgagccccctgaagtcggatcttgtgttcttggctatcaaaggccccagcaacattgcgtctgtctgtctgtcccagtgaaacttttgcaaagaaagcctcccttttacacagagatctgagggcagaataaaaaggatgctgatttgcgaggaaacaggagggaagccctgctgggccgataggaatcttttgacttaaccgaggccagatttgaatacatttggcccagacaagggggtttgggatggaaatccattactttggagaaaagcttcacagggtttcaaaaggaaatatgttaatgttgggagaaatcatttgtgtgggtttgtgtgtgagtgtttcagatgcccccaagtttaacatcgccaaccaggagcaaaaagcaagagccgtggaattgagtcgccgctgttcaggggaggcataaggagctggaggactgggtgggctcggcagcttccctggtcttgcccctgcactcctcacccagctgggactagggtctgagactcagaccgacggggagccccagcctgaggcacagtgctcaaagggcttccctttccttaagatcccactcagagtctcaaggccaatgctcacagagatctcccagatcattcccagtgtccagaagcaaagaccagagcctgagaggggaagggcattgtcacagaggctttgcgggtcaggcctctggactcgagtccctggcccacatggcttctccccatacctcttgctcaacaagcatttgatctgctctctgaggactgcacctgggtgacagtttatacttctactcatggcactccggaaatgaagtgcctgtcacacccagccctgaggacagggatccctgtggcctgccttgttcaaggccccataaaaacagaataattactatcagataattagtcagaaatttccccctgtggtttcaagagacagtagccctggattcaggagccgtgagtcctgggctcagtttggtctccctctggtcctcactttcttcctctgccaaatgaggacaactccagcagtcccgtctctactttgtaagaccactgagaaattccacttaggtcagaaataaatgctgtgagcagggagtccccagagcagggcaacaggagcctctcccaccctccagtaggctcagacacagcaggaaaaacggagtaggttgttttaaaggctgttctgtgtggttgtagcaagtgcacctgagtcgctaagaagccttgcattctcacatcagccctggaatttcaccacagtttcagggctctcttcttcattaggaaaatggttgatagaatttgcagatgaaaagaagcctagggacttgtttgtttgggtggagatgagggatgcagtgggagttagaatctggggctgcctgatttggactcccatctgagcttattttacccaaggaaatgggggccagcaaaactcagcacttgaatcggagcattgtcctcccgctgcaaaagagaagagaaaaaagagagacgatagctcatcgttaatggtcttgaattaaattaaattagttgagcccatcttggctgcttccagccaggcagagaacggggctgctggggaggagcctggaggttccttttgcctcacagtccagtggccacccataaagccattgctgaccgtgcactcttccctcccgccgatcgctaccccctccccaccactaccagcagctccaggctgcaaagtgtcaaacaggatggtgatgggaccactgggataggggcggctccccagagcctgcaatctttggaacattgtcatcgagaaggtcaccattatcaggagaaggagggcatcctgagctcagccacaggccagactcccatatttccctttccaccttcttgccctgagccagagaggtagcaaacatgcacattggtgcccgagtcaaactcacaaaccagagtaatgcctgataacatggtatttgagtatagcagccctgggcaacccagagctaccagagtattgtttgggttcatgggctgtccaaggctctaccatgtttgtttgaacacacaggactatgaattctctctctgcaagtagtccaagtcaggctgtggccttccatgaccacatcagttcagttatcattcaagggatgcaaacttcccatcaggtagcacaaggcaatttaataccagcaaaggggcacagggctgagaatctgcggggtgcggggggcatgggtttcctgtcacaggatggcccacttagccatatgggaccctgtggctcaggactgaccccccagagacatattgagctccctgactcaggattgtcacactggggcatgctaagacttcctaactcaggcctgggcccccaagtcacactaggacccttcactcagggctggcccactacagcgagctgggacttccccaagaccaagcagaacattggctgctcagcccaaggctcggaggccaaagagcatccccagaatccctgcgagataggacttttaaatctatttatagataaggaagctgatacttggagaggtcaagtagcttgccaagaggacacagagcctaaacagctttcaagtaatgccaagagctaacctcagaatgcggtgactaaagctttccatgagattcctcctaccatcttcacaacttccatgaggcaggactagttttgtccagttttgtacacacagcagttgaaactcagaccggtcgaaccacattgccccgtcgcacagctggagctggaatcacaacccacagctgcagagccccagcagccaggcatagtggttaagagcccagactttggagccagcctgcctgtgttcaagtcctgcctttatccatttcccagagatgtgaccttggatgagttcttcgacagcttctcagttgccctacctaatggaaataatctttgtaatatagcaacggtcaggatctataattgatattcacagaacacttccaacagggcctgctaggtaccaagttgtgagtttgttagatgaatctttcttctgtacaaccatgatttcactcattctgtacataggagggttaaaactggcaaactggaggtccctcctctccaggctgccccctgtcctcttgggtccaaggtccagcagaggcacactgccaaaaggtgccccagacccagcacctgtaatgcttctgtcagagcaaacgaggctattaactgacgagctctgtgatagaattgtcccgtgtggtatttattatagggtcctttccctgagaccccccagggagagaatattaaatatttaatgcatgcgatgctgctcgtttttcatccccacttcagcactcaagtcagctccagtctgggggagagccaaagtccaccagcctggccccctcatgccttccctcctcccacccactgcccctctctctagggcacaaagccagacacagcctgggatgggaatgtaatgagacccccaccccagggacgtgcagctgagtcccacgtgaaccctgggaagggctcctccatcagtcaccctgggctggggggcctgcggaatgtcaggggaagcagcgcatctcatctgaagagttgcgatttgttggtcaccagagcttaggagcctcagagcaccctgcctgcatctcctcctctcctctgcacacatttctgactcccccacccacctgccagttctcactcaccacatgcacgtctgccagaggctgcttctggctgcggaagcctgctcagccagcaggcatgagccagaatggccagagagaccagagcatacctgctgtcgaccagtgatatacaacgagatggtgtatgaaaaccccagcgtcccatgcctttcgtgtgggataactcagggatgtgttctatgctgatccctgaggtccctggtagagccccacagcggccactgcccattaacacaccctatcttcgttccttttcctctcggctctcatttcccctctctcctatacatgcatcctggggtcacctcccaaataaacttctgcactcaaatccttgtctcaggggctgctcctgcaggaacctaaatgaagacaatggcttggtcgggttggggacttactagagaacataggagggtacatctcaggggagggtacatctcaggcatgtacttattctctcattgagcatctacctgctcagggtcaggccccgtgctggggctggggacacagcaaggactcaaatctggctcttggaccccatgtgctcccaagatgactggggcactgttatgagacactagccacagtgcagtgtgatcagcacgctctaccatcacccctggccatgcaaaccagcccaagtgatgccacatgaagataaagtcgtgttttcatctcagctcatcccttagtggaaacatcaagctcctgtacaaatgagtacattgaccatcgtggtccaaatactgaaagggatcctgtcaatcatattcatgtgaattttccagctttccttcttcctgtctttcttttctgggtgacctccacccatctgtgttgcacatgggtgctggtggctggaacagtgtgatctcgggtgagaggatagggcattttataagcatcaaggcctgagggtgggtgcagggaggtgaattttccattcccggaatgttgaccaaaggtatgctcccgggcatcaggccttgtgctttggacttcactgtacattaaggacagggtggctgagggggtccagcatctgatgggagagggaaggaagacctagtgatcaggggagggtaggaagctcagcattttacctccatgatctgtaatcctcacaacagccatgtgcagggctatggtttccttccattttacagataagaaaactgagttccaaagagattatgacttatccaaggctactcagctaggtatgcctcagagttcattacataccttcttccctcctctgcagcctggggaagaagaaaagaagcccatcttggattttgtcctgaggacaatgggtagccatgaaaggacaaggtcaatgttgcattttggagccatcatgatctatttagcccatccccgctgccaggctaggggtctatatagacccatccactcctcacccctgccctggtcaggacaggctctgggttgagaagctgaggcctgcaggggccactactaggatggagagcacagcctcgctcttcctttggcagggatttgatcttgcagggactcctgcctggagcagtcttcctccctcttaacccctttccctatggctggctcactatcaagtttcattatcagcttaactgtcacctcaaagagtgtttccctgacccctgttgtgggttgaattatgtcccctgagaaggtttgttcaagtcctcattccccccaccccctgaacccatgaatgtgaccttatttggaaatagtctttgaacatgtaatcaagttaaaatgaggtcatatggggttagagtgaactctcatccaatgactggtgtccctactaggggagggaaatctgggtgcagagacacagtgagaacaccctgtgaagatggtgacggagagccaagtgatcctgccacaagccaaggaaggcctggggccaccagaagctggaggaggcaaggagtctcccctagagccttcagagggagcatgctgactccttgatttcagactttccgcctacagaacagtgagggaatcaatttctgttgttttaactcacgcagtttgtgttacttggttagagcagccctaggaactaatacagctgctcactaaggccagtctccctcatcttccccatcacacatgttcctctcttccctccttcacccctgtaataacaatctacaatgatcattattgctgtgttatgtttattatccatcctactcactagactgggagccctaagaggggagaggccttgcctgtcctgttctctgctgtattcctagtgcctagccctgcgcctgtgacatatagtaggtgctaaataagtgttcacttattaacagagatttaatgaatgtctatcatgtgctagcactgctctaggtgaacaaaataaagagtcctatcctggcacttacataccatattcaacaaggaacataataagtaagtaagcttataggctattagaagatgatgaagttccatggacagggagaggaaaagtagggtgggataagggagatggggcattggggtggaagagaacaacctgcaaaattaaacaaagtggtctagaaggccttgctgacaggtggcacttaagtagattttgaaggagatgagggagttggccatgtgagattcttgaggaagaacattcaggcaaaaggcacagtcactgcaaaagctctccagctatgggaatatgcgtagcacttcaaagaacagaaaagaggaaaagaggtcaaggaaggtggaacacaatgagaaaaggggagaatagcaagggaggaggtcaaatatctgttggctgaaggaagggatggagggagggaaggcaggagggatgggtatagggatgggtataaagatgggtggatggatggatggatggatggatggatatggacagatggaaggaagaatagaaaaagggaggaatgcttcatatctgggaatcaaaagcagggactaactctgtcttctggccatatgttaagtcagtaactgacaataaaggggaccctacccaagaaaagtggccaattgcagaccaaaagaagtcagttctccacaccctttatagccataacacagcactacagaacagagatgaggatgcctaagaaaattgactttagtttcttggggacccaggatccccaacgagggctccttcagagcctgggatctcacccacccagatggctggagcccccacgtacaaggcctcaggcgctcccttagagccacaaaccatgaggctgagctggctgagactcctgacagctaaaagtggatttattccaaatgtatcactaatgaggcactttttgatacagaggccctgaaggttgcccataaaattcatgacaaaccactgagatatgaaatggaatcaagttggtttctaaaaattaggaatttccccttcgtcctccagctgcagctccagctggattgggtcagctccccaaggggcctgcagagcaggcccattgctaagaaccccctgggtgaggcccagaggcccggagtcagaggagtcctttgtccgcacaatctgctccttatcttgctccacccatccccatcctgcctgttctaggaaactttcccagccctccagacagggcacattgaatgtgtacagactttaaggctcatggttgctctttccctacctgtctcatctgtctcccccatgggacactctggctctctcccctgccctctcagcagcactcggcccagcttgccgcttggccttgcagcctcttcttttcttgctttgtgtggcatcacacaggcctggttctcctcctgtttctctggctgctccttctccacctttgccagtgctctttgttctacgatgcaacttccaagtgttggagcacccagggcttcaccttcagcttgctctcactctccctccataaattatctcatccattctcaaagttgaaatatcatcagtatactgacaacttctttgtttttgtttttgtttttgttttccatctctggttccagcctctcccctgaacaccagaattccatctttatgtggacttccaaaaagcatttcaaacttaacatggccaacacaaaactcttgatcttctgtttcctatctcagtaaatggcaccaccctatccacccagttgctcaaaccaaacaccaaggaatcttcctcaattcctctctctcattttcccttagccctcacatctgcaggtcttctctgctcttgttctaccactcaccttgaatctggttgcttctattccacggcttccaccctgagccaggcctccttccttcttccactccagctgcctccaattcactctccacccaccagccagagagctcatctaaaaatgtggactctgctgctggcagaagaaacagcagcaactgtgcacatgcacagagccccagggaccctctgggaaaggccagatgcaggctctccaggaagagacccaagcagcagtccagcaaacagcctgccacctccacactctctatatgctaagaggcaggagctggtgctgcccagagcccagcacatcctaactgctgattaccaatgacaggttgaagatccctaatccaaacatctgaaatctgaaatgctccaaaatcagaaactttttgaacgccaacaccacactcaaagaaaacgctcttgggagcattttggatttcagatgttaggttaggggtgctgaactggtaagtatactgctaatattccaaaatcaaaaaaaacaaatccaaatctgaaacactgctgctcccaagtcagataaatgatactcaacctatagtttcatgttcactaataataatataactctgccttttggctccctttgcaatttgcaaagtaatgccaggggcattaccatcatgactccttcagcaaccccctgggatcagtgtgatacccccagtcacagtgggggtccccacagtgtcagaacagggactgcatcccaggtcttccaaacacaggttccagaaccactcccaccaacccacccatggggtcttcttgaaataaacacttccattaccatcataaaacgtcccagaaattccactgttctgacactcaagtggcagcttccagttaacacggggaatatgggcaaaaatcctttgtcagttagcgggtcccagtttgggtttgggaaaatccttaatgtccatcattctgcccagtggtgctatactcaatcacactgttctagaagagtcttatctgagcgaaagctgtattttgagttcagcagtggagcccctgtttcactcactcattctcatcattcttaaccttgattacacctgagaatcttctggagaccccatgcccagaggccactaatctgttggcctgttgtggggatgggcttttatattttctaagtaccccaggtgattctaaaagacagccatagttgagaaccaccaacagttgatccataaacacatatggaacactggttgaaggctaggcactgggtgaacagagatgtcctccaaaaaaagcttctacctagtatggaaaatataaaggtaaacagatgattcaaatgagctcatttcaagtgtttgtttttgttatttttttaatttaacaaacgtttatatcactgtccagttgctaggcaatgttctaggcactttataaatttacaaatttaaccagtttagatctcagaccttagaacagtggtgaaggtattattactatccccattctccagatgatgtaactaagacacatggagcttaagtaacttagataaagtcacaacatctcatcagtgactgagccagggttctgacccagagaactggacttcatgtttctaaccaccattctctgaaggcagtagttcccacctcatagtagaatttgtgcaggacacagattcttggccccattcacctcccctcataccccctccacccttaggttttggttcaatcagctgagatgagacatgggaacatacatttttttttcacatgtcccaggtgattcagacacaggtgtcctggggactatcctctaagaaactctcttattaaataaggtgtggtggttttaaattgtgtctacaaatgctatgacactccctctaaaaaaatgaaccctccccttaagaatcagctgaacttagtgacttgcttctaacaaacagaatacagaagaaatgatattaaataatatgtgataagtggcttccaagaggaaggggcagaacaagggccagcccttgagccaggtgagatatgagaagcaccaggatgtaccatgcagagcataagagacactgcggcttcctcgttgccctctcttaggccactcattttgggggaagccagctagctgccctgctctgaggacactcaagcagtcctatgaaggagcctgcatggagagaaactgaggcctcttgccaatagcagtaccatcttgacacccacatgagtgcaccgtcttgaaactggtccctccagcccatctggccttcagatagagtgaccatacatcccagcttgcctagaacagtcctggtttatcctgttgactgtgcattccatgcaatttaccatttgtcctggataaaactatcctagtttaaccaatggtaaatgatatagttatcctgttgaggaacccaaattgcaggctaaggcatttggacttcaccctggaggctgtggggagccatggaagggttttaagcttaggagtgatctcattccaattgtgttttagaaagatccatttgcagaaaatgcaccagtgtgcgggaggaactggtatggagggtggactggtttggagaatgggtgtggaggcttgaccaggggaaaacaagatgagaagccagggaggagataaacacagtccctcagccagagtggtcagtgatcatgaccgcctatatgaaggctggagcagtggaagatggggtcacagtaagtttaggaaaacttaggagatattaaacaaacttggctgcggtaagagacagagaagcagcagccaggggtgattctgaggctatcaagggggtatggcccccacatttcagagcccagagctctgtctaaaaatagctctcaaatgagtcacctcaattgcagccaacaaggaattggctggtttgttattgaattgcaggatgtttggccaaacggactgaaaccatgtgtagccttggctcgagaagttcccactggacccagtctcttgctaggggcagtgccatagccctgatgcatgcataatctcactttcttctcacaacaaatcagcgagaatgccataatttcttctcatttatcaggcctgatagaagctgccaaatgcttctagaatgtaggctctgtaggcggcgcagccagaattcaaacccagacctcctcagatatttggtatcagctggaaagaggtttttttgggtaaaatccctagaaacattctcttgcctccttccagctgggatacattggctgaactcgagtcaccctcctaataaaaattccatgttccatcagcagaatgcttccatcccaattagatcaattttctctaagtagcaataaatgtgcttttctttcagaggccagcccgacacattaagtaggcttggggcagccattccccaagcctctggctacgagtgtgtggggtcaggggtcacagcaccaccacctccagctcattagtggggcccattcatctttgctgggacaccagcactcaacatggtggcagggctcagggtgggggtgtgtgggcaattcatcagggactctggttcgccagagacaggagcagaaaagcaggcctgctcacaggccggcaggagccctaggcccaagagctgagaaccggagctgcctggttaaaggttaacctggtctaggatgtctgtctgtaaggactcacagccagcttgtagggaaggaagggcccagggcaggctcctttcagatgcatccggctcctgcctgctaacagtttcccttccggccaactccccaagccgatccttgaaatccatctaagcaaggcctacaggggcctggagaatgatactgtcactctcctgtggtgcggggacctgcctggaataggccctttgatttgcaaatccagacactggaaatgggagcctaagagagccccactctatcctgccctgcctgggccactgggcctggtagaagcttgaccaaaagaatgagacctctcaacttccccaggactaaagctcagcctgcatcaacctgtgaacccacacacacagcccaagtcaccctgagccaagcagaactgcagctctggacatgggattctcagagtggcatggtagtagtttgctacggatgctgtattgatgtaccacaaactaagtggcttaacagatatttattctctcccagctctggatgctagaagtcccagatcaaggtgccagcagaaccatgttccctctgaaggagctagggaaggttctgctccaggcctctctcccagcttctgatagttccctggcctgtgacagcataactccaatcttcacctggcgttctgcatgtgtgtgtatgcacctgtgttcagatttctccatgtgtggtgtgtgtgtgtatgtgcatgtgtgcaacaaggtcttgctctgtcacccaggctagagtgcagtggcacaatctcagttcattgcaatctctgcctcccaggctcaaacaatcctcctgcctcagcctcctaggtagctgggactacaggtgcatgccaccatgcctagctaattttgggggtttttttgttttttggtttgttttgtttttattttttgtagaaactgaattttgtcatgtttcccaggctggtctccaactcttgggctcaagtgatctgcccacctccgcctcccaaagtactggaattataggtgtgagccactgcacccagcccagatttctcctttttcataaacacaccagtaatactggattaggggcccaacctacttctgtataacctcatcttaactaactacatctgtaaagaccttatttccaaatatggtctcattctggggtaccgtggttagggcttcaacatatgaatttgggggtacatacagccccaaagagccccattaactcttccccctttgggccatgtgagaggcaagcctcggggatcctcattcatttggcaaatgtgtattgagcacccatcaggcccagtgcaaggtactaggggtacagtggtaagctggtgtctgctctgtgggttcacaggtggcaggggagacagggacaatcaattacaaaagcaactgtacaattacaaattgtgctaggagctctgaagcagaggtgtgagcagctacaaaagtgcagaaccaggtcacactccaggtaagaagtcgagctggggctggcatcacaatagtgtaagcatcctcagcttccctgggctgttctgcagtgcagctgacccccacccacagctcctcctctcctggctatctggccccttggttatctggccccaacccctacccagcctgaggtctttcctagaagccagattcatggcatctgagcaacctgcccaggaaccaccgctggaggtaatctttctgcagagcccacgggcctggcagaggtctccctgattgacactcaccctggatgagccatcctctcagcagcagctcatccttcagccttccaggctcttgcagctccagcggcatctcagttcagccctgggactccagcacagaatacacattcagataatgaccagtaggtcttggacccaaatgtcacctcctcatggaagctttgctgacctgactcctccaagcccaaacaactcctcaacatccccacctcaaatgaaactaaacaatggattacagaattagctgttctgtatctgtctcccctagagactgtaagctttacaagaactgagacaactttctcatccacctccatatgccccaaatccaccctgtgcctgtcacatcatggtgttttgtaaacgtgagctaggtaaataaacaaaataattaattatttagtcaacctcctacttctttctaccaaaaccacaaattgagccacgggcttgatgcaagtccacggaactcctgacagtaccaggaaaacaaagacatggaatgagagagattgtgttcaggatggagggaacagcttgagcaaagacaagagagggaggaaatgctaagtgggtttggagtgagtatttggtttggccagagcaagactcaactgtgcatggccttgaatgctggacttaggtggtggttacagggtgccatgaaggtttttgagaggttgtggcatgatcagacttgggctgtgctgatgcggagagcaggtagctccacaagaaagtacaaaacgtggggccagagatcaggagagaagtttgggcgaaaccaaggttcaagagctgtcccacaaagaaggcaactgaggtcactgagggagagcaaaaagaggggtgaaattgtacagaatctggggacaactgtagtgcagagaagatgggttcaggaagggcaatatgatcaggaaagcagaggagtgaccagagagaggggaagaaagccaggcctgcccagcatgcttggagggaggccccacctttcctcatgtccttctgtctgcccactgtacggggcagggagaaccaatttcaaaatctgaccccatcaagaaccagctgtaacacctgggcaagtggatgtacctccagaagtctgttttcccatctgaagattggagctggacaaactcaacctgctggggtataaggaatgtgacacattgaaatattattgccagtcccagcacacagctgcctcctgggttttccagcaacacggtcctggtccaaatcagcagcatttcccaacctttgcattgtagacattttgtgctgcatgagtctttaatgcccacatgcattgtaatcttttttgttttatttttgttgttgttgttgttgttgtttgtttgtttgtttttgagacggagtctcgctctgtcccccaggctggagtgcagtggcacgatctcagctcactgcaagctccgcctcccaggttcacgccattctcctgcctcagccacccgagtagctgggactacaggtgcccgccaccatgcccggctaatatttttttttttgttgtattttttagtggagacggagtttcaccatgttagccaggatggtctcgatcctgacctcgtgatccgcccgcctcggcctcccaaagttgctgggattacaggcgtgagccaccgcgcccggcaatgcccacatgcattgtagggtgttaagcagccccccttggaacaaaaaatgtctccagtcattaccaagtgtctgacccctagggagcaaaattgcctccaattgagaaccactggtgtaaaccatgaaagctgtaggcaagtgtctcctactgcctctgtttcccagaggaggtcctatgtgcccatgccctcatgcattcaatcaacaaacattctctgaaccctttttctatgccagacttgtgcctatgtgctgggccgtgaagacggcactgcatagaacagtgatcctgcttgcagggattttacagttactgaaggaaacaattttgatacaatgagatctctcagcagggtaggcaggataatggcccccaaagatgtccatgtcctcatgcccagagcctgtgaatatattactttttatagcaaaaggcactctacaggcgtgattaaattaaggaacttgagatgggggattatcctggattatctgagttggcccaatgtaatcgcaaggtccttgtaagtgagagggagacaggagaatcagagtcagagaaggagatgtgatggaatcagcagttgtccgagtcagagagatgaagctgctatactgctgactttgaagatggaggaggggccatgagccaaggaatgcaagtggctctagaagcaggaaaagacaaggaaacaaattttcccctagatcctccagaaggaaggcatccctgccaacaccttgattttagcctagtgaggcacacttcaaatatgtgactccagaactgtagtctgtggtcatttattacagcaacaataggaaactagtattcacagtcacaccattaagcacagggaactgtaggatctcagggaaagcaacagggctgccacgtataattatccaggtagcacactgccaaaaatttgccagctgaggagatgaacgcggctgaaatttggcccacactccacttgccaagccgtgagcccttatgaggactgtgtttctgagacaaggagcatctttttccgatgtacatacaggcatttttcatttgctaaaagatgtgtccacccaggcttggggaggaggtctttcctaatttgcacaaaggagctacccagataactatggccctggcaagagactctgactcttcctgggatagtcagagaggccttcacagaggaagtaacatctgagctagatcttaaagaacaaacatggagcctgtaatcccagcactttgggaggccgaggcaggcagatcacttgaggtcaggagttcaagaccagactgggcaacatggtgaaatcccgtctctactaaaaatacaaaaattagctgggtttggtggcaggcaccagcaatcccagctactcaggaggctgaggcaggagaatcacttgaacctgggaggtggaagttgcagtgaaccgagatcttgccactgcactccagcctgggtgacagagctaggtgacagagtgagactcagtctcaaaaaaaagaacagacgtggaaagaaagtagagccattctacgaaagagaatagcacaaaagtctgtaggggcctgattcacttagaggaagaagaaggagctccacctggctggagcatcaggtacatggaggagatgattgggagatgcagagttcagcttgggatgtgcagagtctgaggggactgcggaacactcatggagtgatgtctaggaggtggccaaatgcccatgcctggagctctggcaacagggctgagctgctccacaccaccctcctgatgccattccagggagcccaccttggaccagactaaggcccccatcccaccagcccagccccagggacttctccctggctctcggggatgcctggctgttcaatgacttgcttttagggtctagtagtgtctgtccctgcagtggctccacttcctagcacttaactctaagacaggtatttatggtgccttgaccttccctaatatattgctacaaggtaacgtgggccagtcctgcagttctggtcatcccatggcccctccctgggcctgagcaaagaacaagaaaaaaccatcaagctggtcacgaggtttgcgatacaaatggcagtgagttgttttcaggaggcaaatgggcccccacagactaatggctttcagtggctccctccccctccctccctgagcttcccccgccccggtccagagctggcccagctgggaagctgcagttgctccagccacccccaccccccagcccttttgctgacagtataaccttcaggaacctgaaattcctgagtggtccccagagctccatgcatcttgaaagaaaatttgtgtaatgtcatttcaggctgtccctaatccagaattattgagggggggctgggacctgggaattgcctctgacacttgacaaatactcagctttgtgtaaatggacaggctcctgaaataactgcctttggatgtcatatgaagagaaattaattctttattaacttccgcaatgataatctaataaacccatcaggcctccaggccccaacatttaaagagcttggtagtttggatgcaaatgtctcctgaccccattttgtcgggaatatgttcatggagaggaggaataattgactctagaggtcagatgtcagctcagagtcaaaacgagtgactttcatggctccacacagacctgagactcaggaggtttggcctttcctgtggccaccagctgttctggattttctgcgatggcccttaatttcaggtattctgtccctttgttccccaaagagcatttgttctggtcagacaacagtctctggtttttattcagattgtgaggtcaccagagccctcacccgccagtaccaaggggccgttcatatattctttaactcttaggtgcggccaggtgctggaaggaggaatgcaaggcttctgtccctggggcttatggtccagtgggtccgggggagggaggagcaaataaaagaattaattgaagttataaattgagggcacagtggctcatgcctgtaatcccgggagctttgggaagctgaggcaggagaatcacttgaggccaggagtttgagaccagcctgagcaataaagcaagacccaatctctacaaaaaaaaaaaaaaaaaaaaattaattggccaggagtagagtagctgtagtcccagttaattgggaggccaaggtgagaggatttcttgagcctaggaggtagaggcagaggcagcactgagctatgatcaagctactgcactccagcagcctgggtgacatagcatgactctttattctctcaattaaaaaaaaaaaaaaaaaaactaggggaaatggtatgagggcaaaggatatctccacttctccttagagctgagcctggatctcagtcaccacgtgagtccacagtgtgagcaggcagcctggccaaaagggctcttgggtccctcaggccaggcctttctggtgaagtccaggctccatatccctaccatcagcactgacagaaacagaaatctgcacgtccatcctggaggcaggagaaggtgacaggaggtgcaggggcctgccagggcagagaaaccagaaacccccagaatgccaagggcagaagaccccagcctgatctggtgtctgactagtccctgtttgcacacctcccacaatggtgcactcattactgctcaaggaggccccctgggaaatgagtgactgcacaagttcttcttgaacagaccaatgtgtgtgtgtgtgtgtatatatatcttatatgtaaatatacatatatgtaattagcacataataaagctatatcacaaactagtgaataaatgaagaattattcaatctgtgatactagaaccaatggtttaaccatacggaatcccacagagatttagaaactcagtaaaaatgtagcaaaaaaactagaaaaagaaaatgtatatgaatgacatttgagagtagaaaaaggattctctaagcattaaaacactcgaagaactcacgaaagaaaagataatgaatgtgactacataaaaatttaaaatttctctcttataaacttgagcatgataatcaataccacttcttaaaaggggcaaaggtcaaagcagataattcacaaaagaagaaatacaaacagccaatatacatgtgaaaaaaatgttcaatcatgcatataatcacagaaatgcaagtcaaaacagcaataagatgccatcattcacctatcaaattgattttttcttaattgcaatgatattcagtgctggggatgacaagatgtgcactccctcacattgctggaagaggcgcaaattgttacaaccctcctggaaatcagctttctaacatgtatcaaggactgtaaaattctttctactagactctttaatatacaaagagcatggtttcaaaaggagggagaaatggtatagattaagagagacttgcaagttgcatcaaccaaatgaaaaacgtggactttcatttggatgctgatccaaacaagctggctctaaagagacattttttgagataattggagaaaattgaacatggcctgacattagataatattcaggaattattgttcatttgtgtaggtatgttaataacattctggttatgtttttaataagttattttacctatggagaagtaaaacaacttttgcaggagaaatgatacaacatctgggacttgttttaaaatattccaacaaactggggaggagatggataaaacatgattgtcagaatgttagtaattgttgaagctgggtgatccatgatggggtaggagggcccattatactattctctcctatgtatagccagagctttcctgtaataaaagatattttgaatatgtcagttgagccagccatccttctttgagattctatcctcaagaaattatcaaagatctgcacataatttgcaattttaaaaatatggaaccagcctaaatgcccatcaattcatgagtggataaagaaatgtggtgtataccatggaatactatgcagccataaaaaaggatgaattcatgtcctttgtagggacatggatgaagctggaaaccatcattctcagcaaactatcacaaggacagaaaaccaaaaaacgcatgttctcactcataggtgggaattgaacaatgagaacacctggacacaggaagaggaacatcacacaccagagcctgttgtggggtagtgggagcagggagggatagcactaggagatatacctaatgtaaatgacaagttaatgggtgcagcacaccaacatggcacatgtatacatatgtaacaagcatgcacattgtgcacatgtaccctagaatttaaagtataataataaaaaaaaagaaaaaaagagatgtggtgtatatgtgtgtgtgtatacacacacacacacacacacacacacacacacaccatggaatgctactcagccataaaatggcgtgaaataatggcatttgcagcaacctggatggaattgtagactattattctaagtgaagtaactcaggaatggaaacccaaacatcacatgttctcactcataagtgggagctaagctatgaggatgaaaaggcataagaatgaaactttggggacttgggggaaagggtcaggggaggtaagcaataaaagactacacattgggtacaatgtacactgctcaggtgatgggtgcaccaaaatctcagaaatcaccactaaagaacttattcatgtaaccaaacaccacgagttccccccaaacctactgaaatttaaaaaaaataaaataaaatgttaatttcacaataaaatgtgaaaaaatatgcagaaattttttaaaaatgtgcacaaagatttatgtacatagatacaaatgagaaaactggtcatgaaagcaaaaaaaaaacaaaaagaatcagttataagcaaaatatcccataacaagttatggtacagacaaagagctgaatattaagccaccatgataaaaagatatttttaaaatatcagaaaatgctcatgtgttaagtggggaggaaaaaagcaagatacaaaattgtatattcactatgatcccaattacctttaaaatgaatatagttgtgcattttttaaaaggccaaaatgttaactgtggtcatctttgggaggtataattacaaatgatttttatttgcttctttaaacttttctctatgcaataaggtggaaaaaatgtaattatcttaagacatggtgccaacattcctcttaggaaagaaactaagttggagaaacgctttgatgagcacatgggctagaagctgaatccctgaggcctggaccatggggaaaactgatgccaggccaagctttgtctcagggtaatattggcaggggggaccctaggaagaggggaaagcttggagaacataaaccaccaggaaatgcacagaattcctggcaagtacactgaataccctccccttacagaacggagcagtctagctcatttcacctggaactctgaaaggtaatgtctctctctctacaccttagctgacatctcagtaacctggatgttccaagttctctacaataagcaggcattgcttctacaatcagaagaaagcagtgttttatttttctttttgaaggaaaacaaagttttctttttcccaagctggaacttgcctttctggagccaccccctattgttattacctggaactatccagaccaagtcagcgctgtctctcacctgcagcctcagtagtttgaagacaacattcgcttcttctgtctactctagttcctctgatcatgtgttgctaatattgctgtggttctgaatctcctcccgaggttaagttatcttctctaggtgagctctaggaaacctggatcctgtttaaattctagtacatacacctgaatacaagacatctgaccagttcaaggtaaaaagtaactatcacctccctcaaactaggctctatacttctaatgatacatcctatagctatattacattattactgactcatattatgtcaattattaagctactgtctaccagcttcaaacctacccttccaagctctgctttctgatgctagaactgagactctgtaaaccacattttttcttggccagaaggcttcatgtcaggcttagccaacaggggcactagagggagactggaaggctgaaagaggaagaggcatgctccttcatgcttcctctctgttcatggtttagctcctgttccaggtagctttgtctcaacgtgctactttaccctggcagcagcatttagttccagcaactgaaactgacttcagttttcagtttttcaacccttgcagaaccagtctcatcacgtcccccaaaagacaccagcacttgccagctggcatttcctcctcagaggtctgagtcccagctccttgaggctcttcctcccagtttctaacttttaataataccaacctcttccctttgttccctcagccctcaatggctgcttcctgcagttgctctctcataatatctcaatgtgcaaacgttttgccttttcagctttctgatgacaaatggtctttacacaaaattcttcctgttaagatacctggtgtggtttctgtctcctgattggaccctgactgatacactgctgctgagtctcatcttcccccactgtatacctagtgggtgattttctagatgcaactgttagatttcctcctggtaggttttaacatagcttcagcctgtcaagagatggtcagatcctaatcctgtcttccaacgtgtttactatcccttccagtatcatgtcatctaccagtgtgattaacctatgctagagccctgatccacatcactaattaaaacaccacctagggtgttttaattacaggcatggtggctcatgcctgtaatctcagcactttgggagactgaggcaagtggatcactagaggtcaggagttcgagaccaacctggccaacatggtgaaaccccatctcacaaaaattagcggggcctggtggtgggtgcctgtaatcccagctattctggaggctgaggcagaagaatcacttgaactcaggaggtagagttgcagtgatccaagattgagccactgcactccagcctgggcaacagagcaagactctgtctcaaaaaaaaataaaaaataaaataacacccaggacagaggcctccgtaaactgaagaactccctcactttcccccaaagcaccccccaagaggctttcctcatacctggatactagtgaatcacatcagagctgagagttctagaaagccttgtgtgtgtgaatcttcctgacactgcaatgacagtgagtagggcctggctggtgtcagctgtcatggcctaggctccctctggagaggatggatctctacagtgagaacctggtgcatcacctggagagccacaccctagatctggaacaactaggcccccttctcttggaattcactgacccaggtccagcgttcatgctcctcactaatttcacagcaaagcagcagtgcaaataatagcaaaagtctgttttgtaaattgcatcaattatataattttcccaggaatgatttttacatataattagctcaaattgtcttacaaaaactaaaaggaagttgcatccaaaaatagcacatgggttttggtttaccttaattagaaatgcttcctttaaaatggaaataagcaatcttgcaaatcaaagaggctccaaggtcaggtttggggaccccagaatctcttggggaatccaggtggttcttggaggatagatcttcttggaaagaggttttttatttagtcaagagacggtcactccaggtggtctcacctctggtgttggggagcaagactctcagaaagaaaagagacataaatcattagcacacacgccctttcttccaagcactatgcttggtctagacccctccacgtggcttatatggtcctcacaaagaccctgcatgccttaaaactgaggcagctgagttttctggggttgccatgtttgcctaacactacaaaggcaggaagtgtcaaggcctagagcgcaacccagctttcccccatccttcctctctaaactgccgtgataaccacagaatatcagtggctttgcaaaatgacatttatttctccctcaacaaaagactcccaagggtatagctgactgagcagctctccaggaagttatccccaagcaaggactccaggatcctggccccaagtccctctttttttcttttcttttttttttttttttttttttgtgcgtgtgtatgtgagacagggagggtctggctctgttgcccaggctggagtgcagtggcatggagtttactgcaacctctgcctcctgggctcaagcagtcctcccacctcagcctcccaagtagctgggactacaggcacatgccaccaagccctgctaatttttgcatttttgtagagatggggtttcgccatgttgtccaggctggtcttgaactcctgggcttaagacatcctcctgcctcagcctcccacaatgctgggattacaggcgtgagccaccatgcccagcctccaagtcccctttatgtcaaggctgtgttctctgagtcccatccactcagccaattagacaggaaaggagacaaagtgtggaaagggcacattccctcttaactacctctgctcagaggcagcaccaatctcttctccttacattccatcagcaagaactagtcagacagaaggggcacttgaaacaaagctagacaacattcccagaggcccctgaatctgagtaggtccatatgactagtttttgctagtggaatataagcagaagagatggtcactggtgagcctcagacatctctgctctgaagcccaccataataaccaggtcttaccagttccttcccccaagactgcagcctgcttcccttcccttcagttcccggctggattcctggcccagagccaaagataactcatccctgtgacggcatgtcatctctgtctgtgacaagacctcattcacccttggacaaagatggcttctggcttggcccagaccaggcctgccaccaaccacccttgggcatttggtggggccaggttcctggtcctcacccactacctctccactcctctgccctgcttccatcccaccactgagttctgtatctctttactagggctactgtaaaaaagtaccaccaattgagtggctaagaaacagaaacttactgtctcacagttctggaggctagaagtttgtgaaccaggtgctggcagggttgacacctggagtgcagtgagggggaatctattctgtgcctctcccctggcttctggtggtttgctggcaatttttggcattccttggcttgtagatgcatcactctgatctctgacttcaacgtcacatggtgttctccctgtgtctttgtctctgtgtccaaattttcccttttataaagacaccagccatactggactaggccaccctaatgactaatgataataattttaacttgattatctgcaaaatctttatttccaaataaggtcacattcacaggtactctggggcaggacttcaatatctttcaaggggtataattcaacccataacaagaccccggaacatagtagggtcttgtctgaagatgccttgacagtcctgggcaaccttacctacctaataaccagacaggaggaaaaagtgttcctcggacagaaacactcccaatctcctatccccaggcttggaatgtgagtggtatggacagcaggcacatgagaaaaggaatgcaatagcccctcagagccctgcaacatcattagcctcatgatgattaataagtattaataagttattaataaagattaatcaggacctttcccaagagctacagaggaggctggctaatagcacaaaacaaataaatgaaaacaactaggagaaaacctgagttttcaccagcctgagaaccaagtggctacttctcacctcctggagcatgtgagccccaaagcagactgagatataaatcctgctttgccactttttggctgaaacattttgggcaggctcatctcctcccccagggttgggtgaacatcatataagaggtgttgcaccacatgagtgctctgtaagcattggtcaagtcttggaggcaaggcctgaagctggagccttgcttgctacagccgatccctgagccacggccaccccaggcccagctcagcctgaacagctaagcagaggaagcaagccccagatggggagggcagcctcagaggtctccatcccttagagaatctgatggtggtgacagacccaaatggtcagcaacagcagtgacaatgatggctcaacccactctccaagagatccctatgtgccaggcaccacaggaggcaactgctgttatcaccctcactttacagaggaggaaattgaggctcagagaggttacaaggcttctcttagatcacacagatggggaatgatagagtcttaggatatgacttgacacagaggctggacaagacttctttctgctcacccatgcctgccaaggcctgagccagtaacacctataatggacacaacatggcgatggagttgataacacacacacatgcacacctggatttcagaacatctttagggactaggaccacatccctgctgtatcctgtttcacttttctcctgatgctcctagaacctccccttttgaggttctcagcaagtttatatttgggaataattgtaacataatttgatagataattagagcagaattaagttaaaaaatgagtgtttttaactactcatacatccccatgtcatttaaataattcctaatatatccaagccacttgcttcgtgcagcactgatgtgtattgaactgaggataatgaaatacgggatggaagagggaaaatgctatttcagagtctgaagatcaccaattaatgacatgaaaaaccaagagggactctgttcacttaatgtcccctgtgtaggacacaaatgcaggaccccctagcaggctccctgttcagtgcctccaaggcaatcatgacaggccagagggaccaggtggaagggaaacggcaggggcagctccgagagaccgagctgcctctgtgctcccccgaccccccagcaggaccagccattcttgacatcccatccctctgcagttctgacacagctcttcccataatgcctctactcattatccaacacacctactgttttatgctaacactgagatcttgtaacaaactcagaagccttgtcctactaaaataatgcatccactcaacccctctattcatcacggtgctggagccctgaaggatctggtctccatctgcacttccatctaaggccatttgccactcactcactctcacctcacaagctgtcttttagttcttcaaagactggaagctctagggcctttgcatgtgctgtcaccttccaaccccctcccctatatagacacacacacacatacacacaacatcctcctcttgttttcccactttggcaccacagcccaagtgctgggtatgaacttggtatccagaaaattctttgccctgaagttctccaacagcacagtccccaagaaagacagttcaagtttggattttctcccaaatgacctctgaagaggggatttaactcataggatctgaattggcttcctctccctggagagagcctggctcagggacaactggagcacaccacagcccaggatggtaaaccaggcaagtggttcctgcccaggaacactactgtaagccctgtgctgcctcatctgccatcgtccaggtgcctgcccatggctagggtgtagcaccttcttgcaaagcatcccacactgctccccctcctccccagctctctgaaccctgctgaggtttggagtcccaacacgattgtcctcactgaccttcccctctggtccttattggcctaggagttctggcaaggacctcggggttcagtaaccacattcctgtacaagcatcagagcccggctcacactcaaaacactgcacaccttgaggacaggctggctcctccattgctggcccctctgtgcaccagagagaccaaggacttggagacaggccctgtctcaaatgttgggtcctaaagaccaatgagcacatcagacctcattgtcctgattcttggttcagaaaatctcaccacactggtgttctctccaggtttccaggcagcaaagtggagaggctgggagctcagacttccaaaccagacttcagatccaggctctcccacttactaactttgtgtcctccggtacataactttactctttgtgcctgtttcctcactggtaagtggaggtacatggtagtgcctgtgtccaagagttattgtgagattaaatgaattcacattagggtcatcaactgttctgttttgcccggcactgtcccagatttagcacaaaaagtcctgaatcccaggaaactcctcagttcccaggatagccacctgagatagagagagagagtaagagagagagagagagagagaagatacagtgcccgacacatggtaaatactaaataattttctttttagtttgagctaaatgtcaatataccacttaacaaaatgtgcccctcccttgccccacatcccagcagcctcacaagattgatttggggactaacccagtgcctgaagctggcttttccaggtccctgtgtgaggcagaccccttcccactggcccaggatgcctggaggggtccccatgcccaggaacatcctggcccatggctcccctcccctggtaccagagtctttctgctccaaacagatgggcccctgcggggacgcctccgcaccctcggaagggccgctgtttggccaggccccagcccctttcacactcaggtaaaactttaaccacaggcctttggcggcattgccgggccctgcgctcccattcagggcatgataaatgactgctgtcaccgtgacatgaatgctcatattgaaaagccctgctttctgtcttcctccctttcaggccgccaacttctcctctcttaagtcgccgggcgtcactcacatgtcaccctgtcctgaatgcctcccaatctggcacccctgctccctctgcccctcgattcccacctgccccacccctgccccttcctctctggtctcctgccccccccccgcctccattctctcattgctcctccccatcctgcagagcccccaccccaccatttcctcctccttcagtcctgatttgcccatccccatctccggacaggggaagctcacactcttttccccatcactgtccccacagccgataaccacacacaagccctccaccaccgtgtctcaccatcactctccatgctagagttgccttggcactggcaccgctgatgccaacctacagggaaggaaagtgacacccaaggggacccctaaaagtaagtaagagagcagattcacagtgccctaatacagtgtcaagacagtgtgctattgtgtctgtgtgaatccgtgttgtatttctctgggaataggaaacaaagattccatcagatcccccaaaatggaccaagaatcacttctcagaggctctgctcatcccataaaggcttgatgaacacctattggcactggaaacaccaaattaactccacatcgtggggatcaaagccatgctgttgggacaggggacaccacaactctgatgcctcagcccaaggggtttcttttcttcaccaatgagttcagctgccgtaagaagatccacaccagtacagcccaagacagctggggacaaaacccactacagaaggaaacattgtgtggcattgttgaagccaggaaaaactgctgggttttttgtggggggggggtgtgggcggggtggaaaactgaaatttgggggtgggaaatggctgagtgtagtcttgtctgagccagtgtcctgaaaagctccagcatccatcagtctggcagccaaggaagctaaagatggttctgcctggcagagtctgcccagtaagctacctcatttggcatgttaaatataaaggtgtattttggccaggcatggtagctatcacctgtactcccagcactttgggaggctgaggcaggcggatcacttgaggtcaggagttggaaaccagcctgggcaacatggtgaaacgctgtctctactaaaacaaaacaaaacaaaaattagctgggtatggtgacacatgcctgtaatacgagctactcaggaggctgaggcacgagaatcgcttgaaccttggaggtggaggttgcagggagctgaaatcgtgccactgcactccagcctgggtgacagagtgagactgtgtctcaaaaaataaaaaaataataataataaataaaggtttatttcattccgtaaattgctgatcatttcatcatggagatgactttcaagtggctttcactgtggtaacaaatggaacagcaaggcactgggtatcagaagagcatggtagcctcctgtatgccagggtccctcaggaccaccttccaagtgcatttccaattccacacctaccctgggggcccaatgcccagggctgtcttgagacattttcatgttaggaacccctgtgcattgtgagaaatgcgtgcgagcatacagaaggccattgctaagtcttctgtttcccagaattcactgagtgtgggaggaaaggcagagctccactcattctgcataggatatcccctctacctcaaagagaagagccaccctaaggttaaggaagtaccagacatgggcctacacaggacatgggtagccacacctggcttgccaaatgcagagctgaggcaatggatttagttccatgagaggctgtattagtctgttctcaagctgctaataaagacatacctgagactgggtaatgtataaaggaaagaggtttagttgactcacagttccacatggctggggaggcctcacaatcatgtcagaaggcaaaggaggagcaaagtcacgccttgcatagcggcaggcaagagacagagcatgtgcaggggagctcccctttataaaaccctcagatcttgtgagacttattcactgtcacaagaacagcacaggaaagacttgccctcatgattcaactacctcccactgggtccctcccgtgacatgcagaagctacaattcaagatttgggtggagacacagccaaatcatatcagatgccctccaaataagactctaaggtcaaatatactaaggaagcaccacttgctaatatacctttcttagagggtcacaatgaacattattgttcagaacttattcagagttctgagggatcctgcagtaaataaacctggatgacccagggtttccctgatttacttgactctctttgtgcagaatatccatcgatattcctagaaatattgtcttctccaaggcgcattacctacatgacctcactctatactgataatacctctaggaggtggatataattattaacccatgagacagatgaaggtagtgaaactctggaagattaagtaaattacataaggttccacagccactaactagcagagctgggatttttctgattgctaagccgattacctgaccatttgattcttgaggcatgtgaggatgaacttacaaaaagtagacaccatcctaaattagaagcaatgaaaggaagtagcattttctcaatttggtggcctctgtggtgtaagacaaacataggatgtgctcagtgtcagaaagggagagaaggtgggagaggaggaaaactccactgctgggtcctgaatactatcataatctcccccaaggatttctgaatgcagttgtccctaccaacagtttcctctactgagcatattcccaggttgctgcagcctagggatttgcctagcttgtgatatatttcatgcactggtttattcaacttcctgatgaaatctgaggacctccaaacatagaccagcttccctcacccagcagcagaggagacaggaggaagtcagaatcagaaggagctagagtcagccatcaggggacaggagggttgggttgggcccaatctcagagacactacaagaatcatctctcaaggtttccacctaacgcacctccagaaagagataccaagtagcctgcgccaatcaatacgtggcaatctatccttactttaaagccaccacctcctctctcccttttgatgataccactcaatctcagagacagagtctagctgctttaggctctttggtccttgacatcattaatttccccactgaataggccactttgaatttgatcatttattacttgcagccaaaggctttctgacagacacagatttttaaacagattgttatgacacaatgtggcaagtgccataatcaaagtattcacacagttttctgctgagacagcagaaaaagagaaatttggcttacttggtttggggaggatcaagagaggtgatccctgaacagaatccccaaagaaggtttgttcacaggcaacaaggcaaagaggcaggaactaagaaggggatgttattgagcacctactacataagaccttcaggtacattctgccactgagaaaacagagagtatgtaccctcccaaggggtcatcactattaattggctgagccagaatttgagtctgcttgattttgaagtccctattcctacatgctgtctcaatactgccgaccaacaacaaaatggacattcactactactgtgaatgggtctttagtaaagagactctcactctgatagcatcaggaactgcgactgaaagaggaaaggtccttagaaccttctggaagttctgcaattgagcctagaaggtgttttctacaagcacaaattccttgggcttctagggactttgagatcctcaattccaagtattaccttaaaaacttctgtgattttttacttcattctcaatgcccagtctcctgtagaattttactgtggaatttcagtgttttcctttaactctttgtgctagaataaacaggagctttggggaaaacagatctattttgaagttctgctgtaccacttgatagcctgggtaacctcttgacattgggtaacctcctgacattgggtaacctccctcaggcccagtgagttggtcacttgatgctgcacaaattattttaccagctttttatttcctcagctgggaaatggggataatactcccaatcatgtaggacttggagaattaaatgagataatgactggcccatagaagtttctagatacatattagcttccatcttcagtctacagtcttttctgcttaccttcttgaagaatatgtcaaatcaaagcaaacaatctgcccagtttggctcatcaggatatccccaggcaagggcaatgttaaaaacatttaacaaccaacacccccgaggcatcaatcaatcgtactgtacgccattggtacaaggctacaataaacactgcttaaatatttccccttttcctaaataaaaagggaattaattctctctcctaactacacattctctgcctagaaatgaaaactggccaccccagggctgctgaccaggctagtgtcatgattataaatctgggatggagctcaagccaaaaaatattaataccttgagccaaataatagtaatagctagcatgcactgtgctcatgcactttacatgcatgagaatgtaaatgtatgtatacattacatacattccttcttcatccccataaccatctcatggagtagctattaccattatcactattttgcagaggtaaaaattcaggcccagagatgtaaagcaaactgctcacagccacagaaagcatgtcagtgacaggtctgtctggcactaaagtccatactcgtaaaggtggggcactattgtctaaatttctccataattgaaagtccagcccttcaatgccccccattctttaccccatagctgtgtacctggttctcaagtcacacaaactcttcagaggcagcacccatttctgtagatgttcatgtcttaggtcacattctgcacaagcagactctgagatctgaaacaaacacttgggtgcaagtgatgtattagagaagtgctccccagacatactggtaagggattgacagaaaaacatgataggaaagaggaagaagccaagcaaggtgtagtcccagacaaaaatcccactgagggtagcttcagcctattcacaggggagctctacagagtaggttacacagcagggtggccctgatccaaggcaagagagctccaacaagagaataggtggagatgagggtgaggacggaaactgtaaactcccgggaacattctggctctctgtttatgtgaacaaagtgactctaatagcccaagccaattttccaaagaaaagagaagacacaaaggctagccattgagaacatacccaagtcaggacagcaggtggggatgtgcactgaaactgatgacctgtacagagcatcagcattgctacagtcaaacagcctgaggatgcacactgctgtgttgaagtccttctgctttcatgactgcaatccttgagctgagttgacagcataaattggaacatgggctcagctctcaaacaccagaaagagtgggtactttctcggacaggctagaacttttcctccttctggatcatgacagcaaatgggtctcctcagagagtgacctggtgctaaagggtgacccaacgcctagactgatcattgtgggtaattttatagactttgcaagaccccctgcaactgaagtcatgattgcagtgctgttattgctgatttttatattattttatttaacaaattaacttctatttccagagtacaacctcaaaaatgaaaccttcagccttctctcttgccaagtagatctagatttctattacaaaaacatatcttgcatcactggggaaaaaaaagccttgacaattctgctgtgtgttttcaatgccatgtttttgtacattcaggtatcagcttttaggaaaatcaatgcaaaaagggggaagacttagcaaacttgaacctaaaatgaaaatttcttctttattattagtgagtaatcactctcacattagtgaattaactttaaactatcaggcttaagtactgactaaccctcaattgatactttaagttgtattatagttactttcaaaagtaaaaatataagtaataacatatatattcaatattatatatcttgcatataccatgattaatagtattttttaatttttcaagcttgctgtttttaaatgctagtcagggacaaggtcaggggtggggtagggtgagcaggcatcagattgcaaaggtccagccaggtcacttagatcctgggcaatatcccaagggttgagtctggtaaacacacagcatctatcctgttcaatagaaaaaaaaatcattttgggatgtgttaggtttagggctcaaataagcattcctgagttcttcctgttccctgacccagctgccacagagagatagccagagccccaaatccagatggaatggaaccaggcactcagttcatgtcctggttaccaagaatcttgaccaatccagctccctgtcttctccagggccttcttccaagagtggagaggggtcctcccacacaatcgcaaatcccagccactcagcatatccctgaggcttggagaaccatgggtttcattatgaaagagttactatgtaccagatcctctaaaaaacagcttccagacattattttattataattgcatagtgaccctgagaggcaggtatggcagggactgtagtgcaaaattcatgtgctcctctacatttcccaccctctcttgcaactagtgtgggatcattagactgagttgcagcctgtgaactgcaatggaattgatgtccacttccctgaccactctcaggcctaaccacagacttagaggtcaggaaacattttctgtaaaggactagttgggcaatatttcagtctttgcagtccgtatgacctctgtcacaactagtcaactctaccactgtcatatgaaagcagccatagataatatgtaaacaggtgggtgtgactgtgtaccaataaacctttatttataaaaataaactggagattcaatttggctcatgagtgtagtttgctgatccctgccttaaaacctggctggcttatttcacaggatacagtggggaaacctgagggggccctatggaaagacagagccacagaattaaagggcctggttccctgagtcactgctataaagttgcctaacccgtattatactgccacagaagcaagaaataacatattgtgttaaaccacagggatttggggactgtttgtcacagcagctgcactgattaacccgactaacaaaataggttaactgttcctttttgacagctgtgggaaatgaggttcagagggggaaaggatccatccaagtttacaaagcaaagaaagagtagagccagggcttaggacgatcaactcatcctggcatgccagcatttgcctggttttagcactgaaagcccacatcctgggcaaacaaggtcacctagctagtcacccagccaggactcaaacacaggcctgtctggctccaaagctcgtactcacagaccatgaggagggctgctttctgaaaggaggtggagtgaggctcagcttggctcagcatgattcctgctgggaggccccccaccctggtgtccgctccaggtgtgctagagcttgcaggtgagcatggagcctgtcatcttctccctgcaggcctcaggctttttccccaaaggcagtaagtcaggcatgaattttaaatatataccagcttgagtatagacgtcaggcctgacatctataaaatggcactaaatcctgcttttatgagctcttgctgcattctgctgagtgttttatcacactcactggaagtctactgaggggagttaataacccaaaaactctggggcctgcctgtctctggattcagaagtggaacccccagctgtggattttcgagatgttagcacttgcactaaagatgccagcacctccagatacctgtgctctgccctgcctaggtccttcctgctgctcaattttagccccaggctggtgacttaggtggttggggaaggactctctgagagggcaacctttgggctgaaacctgaaggttgaaaagaagatggtcatgctagaaatgaagcgggaaaggccaggcacagtggctcatgcctgtaatcccagcactttgggaggccacagcagaaggattacttgatgccaggagtttgagactagcctgggcaacaaagtgggacccccatctctacaaaaaatctttcaaattagctgggcatggtggtgtgtacctgtagtcccagctactcgggacgctgaggtgggaggatcacttgagtccaggaagtcaaggctgcagtaagcctgcgctccagactgggcaacagagaagaccctgtctcaaaaagaaaaagaaatgaaaagtgtcccagagacagaacagcaaaggctaaggtcctgagtcccgtgacacctaatccagacagagaaggctttccagtagaggactgcagagaaccaggacacatccctgaagaaccacagcctataacagatgtccaaaagggagacctcagcagaacagtcagagaagtgggagggaagcccagaaagccaggaatcataggtgctaagagaggggagcatttcaaggagagagagtttggtggcatcagatgctatgaaaaacctaatttaaaaagcacagaaagaggtcccttggctttggcaatgccaatgtcacaaatatttaagtgcttactgtgtgctccagggtccaagctccagggaagcgacggtcaaataaagcagtagtttgggggcagggagggtaggacagaaaatctacaagtaattccaatgacacatgttctgttctgtaggatcccagaagtggggcaaagtaactctaccaaggagttgagaagatttctgaaaagtcagacatctgagttgggctgtgaaggttgaatagtttactactaaggtgatgagatagaggaaatatcatgggcaaaaatatcagaaagatatgtttaggaaaccaaggaagtcccttagcctaggggagatgaggctgagataattgggaggagataaaggacctccagccctgccaagaagttcgggtttattctccaggcaacagggtggcatggagggagacgtcagatttacactttagaaaataatttctaaaaccctgcacactatggtgtgtgcctgtaatcccaactacttgggatgctaaggtggcgggatcacttgagcccaggtgttcaagtccagcctaggagagctagtgaggccctgtctgtgacagagagaaaaataaaagaaaaaaaatagtttctggctttgagtcccatccccagctctaacactaagcggcagagtgacgctagacgcatcccttccatcttctgggcctcagttttacccactttgaagtgagaagataagactatccgttccagttcttatgatctgagggttctgtggtccttccccaaccacctgggcacccatgtaagagtcagctgttctgaaagagccttttgtttgtctgcatctgatacaaataaattcatcgcttaggttccaatttcagagtcataatttgcccagcacttttcagaagagcaaaatgactctcagggtcaaccatgccaccagcgtgtctaagaggctttttcccaattccctggtgaggatgagaaacaaggactccatcgtgacccaggggaaaggctgacatttggtgagatgtctgtatttaactcccactgcttgacatctgctttcaattaatctgcctgtgttaagagagatgctgcccagagcatgcgattcaacctcagttctggaggggcagagagaagcagtcacagagagtgaatgcagatcctagccacccactgcccccaacccacaccctcaggggctccctgaacccccaggaccacctggcctgcaggcacctgagggcctacttcactcccacttcacaattgacacttcagcaataccaaccgggacacatttgaaggactaaaagaaagtcaaactgaggtcactggagacactgacaagagaggacagtggcttagtgagggaggcaggggccaggtcacacaaagccttatagagcatgtgaaggagtttctgtttttatcctgggtctgattagaagtgacattgttaatttgcatatttgaaatatgtctccaggtgcttcatggagaatcggttggacagaggaaagattgggagaggagatggcttcaaactgcactgtccaactcagcaggcaccagccacagtgagcacttgaaaggtggccagtgcaattgaggaaatgaaattttttgctacaggcttcattttttatttatattatttttgcatgtatgtaaagaggcacaagtgtaattttgttacatacatacattgcatcatggtgaagtcaaggcttttatggtgtctgtcacctgaataatgtatattatacccattaagtaatttctcatcatccaccccctcccacctcccaactcctttgaatcaccattgtctatcattccactctctacatccacgtgtacacatttagctcccacttataagtgaaaacatgaggtatttgactttctgtgtctgagttgtttcacttaaggtaatgacctccagttccatccatgttgctgcaaaagacatttattcttttgaatgactgaatggtggaactgaatattatattttatttaaattaattaaagttaaagtaaaatacttaattcagctattttaaaactttgaagtatgtttggaacaacctaggtacataattctactttctccaacagtaaatgttatgaaatctaaatacgaataaagtattttcaatggaaatttatcatccaaattgaaatatgctgtaagtgtaaaatgcacaatggatttcgaagacttaggacacaaaaagcaaaagaacaagtatttcaatcatagtgtatattggccatgttaagatggtaatagtttgaatatatcatgttaaataaaatagattattaaaactaaattaacttgtttatttttacttctttaaaattttgtcacaagaaatgtaagcttttatgtgtggctctcgttgtgtttctataggacagcactgagttaggaggaaagatggtgatttagactacagtaatgatagatccgagatatgttttgtaggtcacattggcagatcttgctgataaattggatattgggaacgagtgaaggaagaggaagtaccagagatgatggctaagtttctggctccagcacttaattggaagatggtgtcattttcttgaatgaggaagacttggggaggaaaagctggggtaggggtggggactaagggttcctatgggacatagtgagtttcagatgcctgtaagatgccaagcggagagccgggcatggtggctcatgcctgtaatcccagcactttgggaggctgaggtgggtggatcacctgaggtcaggagttcaaaaccagcctggccaacatggtgaaacctcgtctgtactaaaaatacaaaaattagctgggcatggtggcatgcacctgtagtcccaggtacttgggaagctgagacaggagaatcacttgaatcctggaggtggaagttacagtgagccgagatcttgccactacacttcagcctgggcaacagagagagactccatctcaaaaaaaagatgccaagtagagatataaaacagacagttggatgcaggggcctagtattcaaaagcaaagtctggggagaagatctaaatttggaagcaaccacttggaaaaactaggtttctcctctgtttatgcatttcacaacagacagacagacagacagatggacaacaatgttaatgcactcccctgctctccagttacagtaaaatccttctgaatattcaaatgttccctggagctttgagtcttctctgtatttcacgagccaccagctctctcttcttcactcctccctcccacccccctgactcagataatcccttccttggctcgcccacccccaaaacttgctgggcaaaacactgtggcaaagacacccattgcagacagtcagtagcagcaagctatgggtcaggatgtttgcacaaatgcttcacagcatcatttatcttgagggatgtcaactcgaaaaatgttagttcatgtcactgtcagggtaaatgccaaaaattagctttctttcatcagaaaacggaataattaactttgcaactgtttccaaaactgctaattaatgggttttacccacttgatttgtcaggctacattgcgagctgaacagcagcctgagcccctggaggattcccatcctccccttctctctgtccctgcagaagttggaagaagttacaggtaaacaagtagagaaaagcaagaccagaggaaaacgctgctattttggagtcgagagttttcctttgcctttcaaaatcggtctcctaccacttttctttcccacatcactccaatgggaggtcaaaattccccagttgatctcaaaattgtgttgctcagccttagcggatggggcaaccatctacctgtccccaaatctggaggtcaaatcagattcctgcctgtctccctccacaaggtggtgggcacaggggttaaagacaggccttggaggcagagggggctttgaatgccagctctgattctcaccagttgtgcaaacttaagcaagacacttcccttctcactatctcagtttcctcatctgtaaaacgggattcatggtagagtgatgtcattgagtgggtgaacgctcccaaatcttactccactataccaaggctatatatccacaccttttgccttttaactttgcagggcatcccattgtgggaagtgtggggtacttccctttgatttttttttaattgtggtaaaacacacataactaaatttaccatcttcttcttcaccaggctgctataatattggctactaacagtgttcaccttttctgtggaattgccattggctaaacaggatctgtcagcttggggccagtgatggattagcaagggaggagtgtatcaaaggactttaaggtggcaccaatgttggggtgccatctttcctccagagctctccatggaaccaggctgaagcttatgtcaggctaacacctcatctttactcaactttcttctgcttgatcatgctttcttaacttcccttctcttgagagcagagcccagtaaaatattttcacaataatcctcatgagcagtaataaatagttactgtcttctttgtttttgtttttgttttgtttggggttttctgagacagggtttcctaggctggaatgcagtggcatgatcacagctcactgcagccttgaccttctggactcaatcgatcctcccacctcagcctccctagtaactgggactacaggcatgtgccaccatgccctggtaatttttatattttttgtagagacaggttcttactatgttgcctaggctgctctcaaactcctagactcaagcgatccactcacctcagcctctcaaagtgctgggattataggcatgagacaccacacccagccaatggttgttgttgtaagccactgaattttgaggtgttttgttacaaagcattataaactgacacaattagaacacatgaaatatgaaatactatccagccattaaaaatgatgggagccctatgtattgactacaaaacatgtcaacaggcagttttctgggggaaaaaaatgatcacaggaaagttttatagcagcattcttttttttttttttttttttttttttgagatggaatctcactctgtcacccaggctagagtagagcagcacaatctcggctcactgcaacctctgcctccaggtaaaagtgattcttgtgccttagcctcctgagtagctgggattataggcatgcaccaccacgcccagctaatttttgtatttttagtagaaacggggtttaaccatgttggccaggctggtctcaaactcctaacttcaagtgatccacccacctcggcctcccaaagttctggaattacaggcgtgagccactggcatccggcctatagcagcattctttttgttaaagaaagttaacacatgcttccatgtggatattcagtgtctagcagggtcttcaaaggatgaacagtgtttagtccctgtgtggtgggactatggacaacatattacttctatctttgcatttattttatataatttcatgtttaaatggaacttcggttttatttgaattaaagttgtttaaacaaaaaaacaaaaaaaaattttttttttttgagacagagtcttgctctttcgcccgggctggattgtagtggtgcaatctcagctcactgcaacctccgcttcccgagttcaagtgattctcctgcctcagcctcctgagtagctgagattacaggtgtgtgccaccacacctggctaaattttttgtatttttagtagaggtgggatttcaccgtgttggtcaggctggtctcgaactcctgacctcaaataatccacctgcctctgcctcccaaagtgctgggattacaggcctaagccactacacccagccacagtttctaagtgtatagttcagtagcgctaagtatattcacactgttgtgcaacaaatctctagaactctttatcttacaaaactgaacctctatacccattaaacagccccttattccttacaggctttgctgatgaaaatccattctttgtttcattcagtgtacatttgtcacacacctcctacatcccaggcattcttgtaggcctcggggatatagcagtggataacacagacaccatccctacccacctatcacttgctttcttgtcaaggagatgggcaataaaacaaacagatacataacagaaaccaagttagaagataagtactatgaaaataacaagaagagctagtcatattgagtcctcactaggtaccaggcattatttgaagtgttttaagtgaattatttggtttaatactcaccacagtcctaagaagcagttagtattattataatccccttttgacagaattaaaagaaacaggagggaaaaaaaagattaagcaatttgccagtcacacaagtggggaccagcaaagctgggatttgagccccagaagtctgactctggcactcccctgccaaacaattagccatgccgtcttgcacttattcatttactaatgtttgtgaagtgcctattctgtgccaagccctagagatctgtgtcagtgaaggaaacaggcaaaaatctctgcccttcatgatcttccatccaatcaagtgtgggaaggcagacattaagaaaattcaaagattaaattatgtggtatattgtaatactgcaaggggacagtctgtggagaataataaaaggaagtcacaggcacaggtgctgcctttttctttttttttttttttccgagatagaatcttaccctgttgcccaggctggagtgcagtggcgcaatctcggctcactgcaacctccacctcctgggttcaagtgattctcctgcctcagcctctggagtagctaggactacaggtgtgcaccactatgcctggctaatttttgtatttttggtagagatggggtttcaccatgttggccaggctggtctcgaactcctgacctcaagtgatccacccgcctcagcctcccaaagtgctgggattacaggcgtgagccactgtgcccggccagggctgctcttttaagttggtcaggttgctacttaggatgttccaggagggcctctctgtggaggtggcttttaaagagacttgaaggagatgagggaatcattcatgcaagtcctgagagaacagcattccagaaggagagaacaaacaaaggcaaagacccagaggcaggaacatgcctggtgtgttcagggaataacaaggaagcctgcatggctggaacaaagtgatcaagaagataacgaaaagaaatgaggtcaaaaatagtgcaggacaatttatgaagttttagggccaaagaaaatgactttgatacatggagaagccttaaatgtacattactaattaaaggaagccagtctgaacagactacacactgtatgattccaactatatgacattctggaaaaggcaaagctatagagacagtaaaaagatcagtggttgccaggggttcgggagggagggagaattaggtggagctcaggggatttttaggaaactcctctgtatgatactgtcacggtggatacatgacattacgcatttgacaaagcccatacaatgcacaacacaaagcatgaaccctaatgtaaactatgaactctagttaataataatgcatcaatattggcttatcaattgtaacaaatgtaccacactaatgcaagatgtacgtaatagaagatgtggggagggaaagtggaaattggtatacgggaactctattttccactcaatctttccataaatttaaaactactccaagccatgaaatctattaatttttttaaaggactggattttctgtgagtgagatggggagacatttgaggccaggaagcagactgacaatggactttgctctaacaggatcctctggaggatcctgctatgcagagagtacactgaaggggccaagactggggcagggagacaaggaggagctgttgaaatagtccaggcaagagacaagggtgttttggaccatggtggttactgtcaccaggtcagaagtggcatggatagagccaacaggattttctgaaggaatagagggttagaggttagggtggaagcccccacccgcagtggcctgtggcttacccaaggcaaaatgaacacgtacttatggtgcccagacaaagtggaaaatagcctggatgaatttatctctaattgcatatttaaaagggctattaaaaagcttttttaatttccacatgcatgtgagctttgaggttttgagttcattattgtttttactctgaactgcatatgaacaggggctcttccatctctcagtgcattggacctctagaggtcccaataccacactgcctaaggggtacaatccaggaaaagccaccacagtcaccatcatggctgaggaggggccatgagtggttgattgtctcatcctgaatgcagaaggcttccacacaggtctgtgcccaagaagtcaaggttctggggtctctgtgagcccctaacagtcatctggtccaaccctgcattgtacacgtgaagtaactgaatcccaagaggtgcaagtcactctcccaagttccctcagccaggtaaaggccagagttggggcctcctgatgcccagatgagagctctgtcctcctgcaatttgctgtgttcatttcctgtggctgccataataaaataccacaacctggtggcttaaaacagaaatttcttccctcacagttttagaggccaggagtctgaaaccaaggtgttggttagggtcccactccctgcagaggctgtagagaaggatctcttcctcacctcttccagttcatggtggctgcaggagttcctaagcttgtggctgaatcactctgatttctgttttcatattctcttctcctccctgtgtctctcctcagggtatcccttatggacacttgtcattggatttggggcccacccagataatccaggatgatctcatctcaagatccttaataatatctgcaaagatccttttttcaaataaggtcacattcacaggttccagggattttacatggatatcttgttggggaggtaggtcatttttcaggctatggttgtcaatgcccataacatggattaagctctctagctgccagtagccacccacatcacaggagggagagaatggctcatgtgcccccaaagacctagcctcagagcagtgagacccgggctccttcctcacaactgaatgtgtggtacacagattcttgggtggccccatgatcccccctcttaatgttaaggactttgtgtgatcttatccccttgagtgtgggcaggactctgccttgcttctaaccaacaggatacagcaacggtaatggtatatgtgtgattgcatgtgcatgactgtgttgcatcagattgtaatgcctatcttcctaagagactctctcccctgtgggatttgaagaacaaggctgccatgttatgtgctgcctatggagagggccacatggcaaggaattaaagtaacctgtagatgacagccagcaaaggggccagcaagaaactgggccctcagtaagcagcctgcaaggaactgaatgttgccaacaaacacatgaacccagaagtgcatccatccccagtcaagcttcacatgagaccacagccctaaccaaccccttgattgcagctttgtgagaccccagtgtaaagggcccagctaggccatgccctgactcctgacccagagaaactctgagataataaatgtattgttttaaactactaagtgtgtaataatattataatagagcaacagataactaatgtggaacctatcatggtctccccaagccaactccttcagatgattgccattccactcacccatatgccaaaaacctgggtatcacctggggctctttctcctcctctcagcattccccctccacatccaatccatcagcaagtcttggcaagtcttccttctaaatgtcttcctgtctcatggaaaattaccttgatgcaatggtgacccctaagaacaccatcaggtaactaaatcagaggccatggaactgaaaacctcacagactaaattgagatgctcaactcacaccattcattaaccaattaaaacccaaagtcaaacaaaatcaaggaggcagggcatggtgactcatacctgtaatgtcaacactttgggaggctgaggcagaaagatcacttgagtccaggagttcaaggccagcctaggcaacatagtagagaccctttctctacaaaaaaaaaagaaaaattagccaggtatggtggcacatacctgtagtcccagctactcagaaggctaaggtgggaagattacttaagcctgggaaattgaggctgcagtgggctatgatcacaccactccactccagactgagtgaaagagcaagaccctgtttcaaaaaaaatcaagaaaaaaatgataaggttggttggctcatttagaattgggtacacacaagtaagtggaaggaacaaatgatcctggatccctggggtatgcaacattcatgtgtcctgtttctctctctccctctctttctttgtccccctccccatacacacacacacacacacacacacacacacaccagcctgccctgctgaagtatggatttggaggagcagtgttgaggtttgagcaagggagcatccaacagataaagatgcccggggccaatcacacacaactctactggactggagagacctagaaaaatacacagtcttggccactgctgtagtttgatcactagcctgccatacagccaagggctttatctgcatttcttggatggaacatacgtagggccagaatgagactaggattggtgactccagtgggtggccaatttagggacgacctagctgtcagactagcagtgacaccatcacaacttggtcttttcacccatttctatttacaacactcttatttgttttgccatagaagtcatttaatctatctatgattagtaagttactaacattcttactatctatcaacacatttaacataccttatgaattctgcctgagttgtgtatgcttaacacttcctctaaattttgtctctatttcataagctcctagcttatgaaccatctatgctgaacacttcttaggaggttcatccatcctatttgcttttcttatcctttataaaagaattacatattatcatgtaatgcagcaaacgcgtgttacacttcccaaaccatccactttcttgcaactcctctgcctccaccacagtccaagctgccactttctttcaactgcaacctcttaattggtttcctgctactacactgaccatccccacagtatccggaaggtggcttctaaaagggaaatctctttctgtccagcctggccataaagcataaactcctgaatgacattaaagcctatgatgatacagtcacaacgccctctcctctcacttcaagtcccgctattgcccacctcccacaccatgcactctcagaaccagccctgcctctgcacatgccctgcctagaatgagctctttccaatgttcctgctcaactcctacactccaatcaagacccagctcaggcatcacctcctctgggagccattctctgattctctccccagtaaatattcagggaggagacaggcaaggagaagagaggacgaagagagagaaggaagaatggaggaaagccataaccattccactattaaatggaataaatccagaagtaataattgccctccccctcaaggtatttaaataagactgaatgacatctaggaaaaataattgcagaaattgttcaaacacagaatatgcacttgcaccagaaacaatccacaatttttccttggagtccgggtgttccaattatcttttggggcaaagtaaatgaccccagtgcttactggcttaaaacaacaaccatttattatgtctcatgatttttaggccatttttctcctctgtggcactgactatgctcactcagtggtatttagccagcagctgggctgggctgaagtgttcaagacagcatcattcacatatgtgccttttggcaggagccaggagtctaggctcagctgggtgtctcccctctgcatgtagactctggtctgtccagcatatccaacagcatggtcagacatcacatgcggcatctcaggctccaggagaccaaagtagaagcggccagtctttttaaaaacggccgagtgctgtggctcatgcctataatcccagcactttgggaggccgaggtgggtagatcacaaagtcaagagatcaaggccatcctggccaacatgatgaaacctcatctctaataaaaatacaaaaattagctgggcatggtggcacacacctgttgtcccagctactcgggaggccgaagctggagaatagcttgatcccgagaagcggaggttgcaatgagccgagatcgcaccactgcactccagcctaggcgacagagtgagactctgtcttgaaaagaaaaaaaaaaaaaaggcccagaactggcatggcatcccttcttcaacactctattggtcaaaacatttaggggccagcccagcttcaaggaagaggggaaacagaccccacctcttaatgaggactgtcaaaaaatctgcagccatctgtaaattcctgatgtggaactgaagaccacatctccagaaagcctcaccaggcctgggaacagtccagacaaaacagccactgaacccctgacaacagtaactatgagataatatatgttttttgttagttaaacccatttcatttggggataatttttttttttaatggagtccctttctgccacccaggctggagtgcagtggcgcaatctcgtctcactgcaacctccaccacccaggttccagtgattctccagcctcagcctcccaagtagctgggattacaggtacccgccacaatgcccagctaacttttgtatttttagcagagatgggggtttcgccatgttggccaggctggtctcgaactccttgtgtccggaattggtaggttcttggtctcactgacttcaagaatgaagctgcggaccctcgcggtgagtgttacagctcttaaggtggcgcgtcgggagtctgtcccttctgatgttcagatgggttcagagtttcttccttctggtgggttcgtggtctcgctggctcaggagtgaagctgcagaccttcgcggttagtgttacagctcttaaagcagcgtgtctggagttgttcgttcctcctggtgggcttgtggtctcgctgggctcaggagtgaagctgcagatcttcgcgataaatgttacagctcataaaggcagcatggacccaaagagtgagcactagcaagatttattgcaaagagcaaaagagcaaagcttccacagtgtggaaggggacccgagtgggttgccaatgctggctcgagttgccaatgctggctcgggcagcctgcttttattctcttatccggctccacccacatcctgctgattggtagagccaagcggcctgttttgtcagggtgctgattggtgcgtttacaatccctgagctagatacaaaggttctccacgtccccatcagattagttagatacagagtttcgacacacaggttctccaaggccccaccagagcagctagatacagagtgtcgattggtgcactcacaaaccttgagctaaacaccgggtgctgattggtgtgtttacaaaccttgagctagatacagagtgccgattggtgtatttacaatccctgagctagacataaaggttctccaaggccccaccagagcagctagatacagagtgtcgattggtgcactcacaaaccttgagctagacacagggtgctgattggtgtgtttacaaaccccaagctagatataaagactctccatgtcctcaccagactcaggagcccagctggcttcacctagtggatcccgcactggggctgcaggtggagctgcctgccagtcccgtgccatgcgctcgcattcctcagcccttgggtggttgatgggactgggcaccgtggagcagggggtggtgctcgtcagggaggctcggaccgcacaggagcccatggagtgggtgggaggctcaggcatggcaggctgcaagtcccaagcccttccccgagggaaggcagctaaggcccggcgagaaatcgagcacagcgccggtgggctggcactactggggaacccagtacaccctccacagccactggcccaggtgctaagtccctcattgcctggggccagcagggctggccggctgctccgagtgcggggcccgccaagcccacgcccacccggaactccagctggcccgcaagcgccgcacgcaggcctggttcccgctcgcgcctctccctccacacctccctgcaagctgagggagcgggctccagccttggccagcccagaaagtggctcccacagtgcagtcggggggctgaagggctcctcaaatgccgctaaagtgggagcccaggcaggggaggtgccaagagcaagcaagggctctgaggactgccagcatgctgtcacctctcaatcccccctctaaacaggacaccccaactgctgttgggaatttggctgatgaccgctctagctacttcctgctgcataggggcgaaggaggggccctgcacttgtggtgtccttctgagggaactcagcttgcagggaggtgtggagggagaggcgcgagcgggaaccagggctgcgtgcggagcttgcgggccagctggagttccgcgtgggcgtgggcttggcgggccccgcactcggagcagcccaccagccctgctggccccgggcaatgagggacttagcacccgggccagtggatgcggagggtgtactgggtcccccagcagtgccggcccaccggcgctgtgctcgatttctccccaggccgtagctgccctcccgcggcgcagggctccagacctgcagcccgccatgcctgagcctcccacccactccatgggctcctgtgtggcccgagcctccccaacaagcaccaccccctactccatggcgcccagttccatcgaccacccaagggctgaggaatgcaagcacatggcgcgggaccggcaggcagctccacctgcagccccagtgcgggatccactaggtgaagccagctgggctcctgagtctggtggggatgcggagagtctttatatctagctcagggattgtaaatacaccaatcaccaccctgtgtttagctcaaggtttgtgaatgcaccaatcgacaccctgtatctagctgctctggtggggccttggagaacctgtgtatccaaactctgtatctaactaatctgatggggacgtggagaacctttgtatctagctcagggattgtaaacgcaccaatcagcaccctgacaaaacagggcactcggctctaccaatcagcaggatgtgggtggggccagataaaagaataaaagcaggctgcccgaaccaccattggcaacctgtttaggtcttcttccacactgtggaaggtctgttcttttgctctttgcaataaatcttgctagtggtcactctttgggtccgcgctgccttaagagctgtaacactcaccgcaaaggtctgcagcttcactcctgagcccagcgagaccacgagcccaccgggaggaacgaacaactccagacgcgctaccataagagctgtaacactaaccgcgaaggtctgcagcttcactcctgagccagcgagaccacgaacccaccagaaggaagaaactccgaacccatccgaacatcagaagggacagactccagacgcgccaccttaaaagctgtaacactcaccgcgagagtccacggcttcattcttgaagtcagtgagaccaagaacccaccaattctggacacatcctgacttcaggtgatccacctgcctcggcctcccaaagtgctgggattacaggcatgagccacggtggctccctgaggataattacatagctgtagatgccaaatacattcaccctttccaaagctgtccttccatccatattcaagacagtgtcctggaagggaaacatccagggacaggatgtgtgatggatttcaggataagagcctaaagttaaagaatttaagaaagttatgagaccagatcttcaaaatctactatctcggagccaattctcattcatatacgcacgtaacaaatatctctgagttcctactctgtgctgcgcgttaagcaaagtgctggagatagaagggtaagcaaaacagacatggtctctcaaatcacaggtctctttaagaataccccagtctgggtcctttctatatcctgtaagtttcactcccagggcagctactgccggatgaaaatgggctctgggccaggcctgtaatcccagcactttgtgagggtgaggcaggcagatcacctaagctcaggagtttgagaccagcctgcccaacatggtgaaaccctgtctctactaaaaatacaaaaaattagctgggcgtggtggtgggcacctgtaatcccagctactcaggaggctgaggcaggagaatctctttaaacagggatgcagaggttgcagtgagccgagatcacgccactgcactgcagcgtgggagacaacagcaaaactccgtcaaaaaaaaaaaaaaaagaaagaaaagaaaatgggctctgggcacctctaataattcacagcccctgtccctagcccagcctgctcactagtcttgctttccttcttggcttctgacttggctcatttcatgttacccattgcttggacctaatacgctggctttgggcttttctagcaaaccacattcccattcactttcacgttccaaaccagggccaggcacagtagccgcgaccttagcatcggccctaggagtgacccggaagtccatgccaccagtccagaagtcattccggactcttctttcctgtgtctcccggtccagttcttccttccgctgaacgctgagaaagtcgtccctgggcgggggaagctggctctttgcttcccctcgggcccatgagccattgtccccaaccagcgaggcgcatcttagaagcaccatctcctcgggctcttttcctgctctgcctggattgggctcatttactaaaaattagttgggaatgaaaaaagcccttagtttattagcgtgctattattcccctcccaccatgcccctgcagcatgatggattgcctggtgaggggacgcagccccagccggggagtgagcaagctctgctcggtccccggcgcagacagatggggaggccgagtcctgaccatgattgattagctccgcaaagcctgttgagcggagttccatcaagattgatgctttctcctcataacagcatttccaaaaagtttctattacattttgattatgtttatagaatctcgctggtccgggggaagatgcaatctcgttcgttcccagtatgtgtctgcgtgggccgccacagcgcctcacacagccctgctagcttggcctttgcagagtgacctcactttctggtcaggaggaaggacttgggttgcctcccaccatcaaggtggaagaagctaatgtccactctcccagtgcccagagttcagtctcacggcagttctggttttcgaagcccaaccatttcaggtgttctcaggcctgggcctgaaggtaaaagagaaaatcagagcaaaggcatttcctgagatcggcaggctgttgcggaagagactgggcagccctcatttttctacgtggttcccaaggacacagtaagaccacgtcaaatgcgtggcaaaatatatgtttaaatatttatgcaaatgcatttatttatgtgtgtctgtgtgcgtgtgtcccattttaccccacaaaggatttgaatgatgtacaagaaatgtggaaaatgaataaagaacaagaattcggaccagggaaatgcaaatcaggctagaatatcaagaccaaaaggaaaaactaaatatatatgcaacatgtaagatgccacagtctttatgcttgggcctttaagttggtctgagtttcctgatagtcaacgtgaaaagggaaataaaattggttacttagttcttttctagctgttattaataaaagaattttcagaaatgccagttctttgggggaatcttagggtttcttccaattttattctaaaggaaattttgtactagagagttgtaaatagaagactacaataaatatgttaaaccagtactgacattttgggctagataattccttgtgtgggggctgccctatgaatcataagatatttagcagcatccttagtctatactaaccagataccaatagcgaaccctcttcaagttgtaataaccaaaaatgcctccagatactgtcagatgtatcctggggtttgctattgctagatttaacaagaattcagaatgcccagttaaatttgaatttcacattttttaaaatgaataatattttaatgtaagtatttcccaggcaacatttggatatacttatactaaaattatattcttttttatctgaaattcagatgtaactagccatcctggattatgtcaagtaaccccacctgatgggccacatcctcagtgggaagatctcccaggaacctttcaaacatgatgcactgcaaggggcttactctccacatcatgttttttaaagtgtaacaatgtgaaaacatgtttttcttcagtgcttctttttttatttatagataacaatagtttgccttctgttttatatctttttaactataaaatttaattgtgatctatcttgcaaataaatgatatacttttgaaaaaataaataaataaaaatttaaaactccaggccttttgcagtggctcacacctataatcccagcactttgggaggccaaggcacaaggatggtttgacctcaggaattcaagaccagcctgggcgacagagtgagaccccatctctacaaaaaaaaaaaaaaaaaaaaatctaattgagcaccactatgttaaacagtgccctcaaaacagccctttggggtaataatgtagccagagaattccataagactgggtcttgtagtatccacagaagaaatcaagggcataactctacaatataactttaaaagagcaattctgcacagttctaaacaatattatccttccacaatatttttgacgatcctgcttgatccagtgttaaaacctagagacactttgctgcaacctccccctagtctaactgcccagattccctttgcaaaaggcagtgaggtgagtctcacctgatggtcccaaatgatcccatgctggtgctgctagtttcctttggccactgggattacaaagtagactcaagcaatctctagaaattacccattctagggttactcggttgtaaaaactggctagacatttggaaaatagcagttggatcccttcctcatcctttgtaccaaaataaataccagatgtatcaaaatttttaagcatgaaacaatgaaatcagattagtactagaagaaaatgtgggataactttttggaattgccaggataggaaagggccttttgtgtcaccttcgggacacaaaatccagaaacgatggagtaaaaaaagattgagagattttaccacattttttaaatgtaagtctctgcatggcagacagaaaaacgaagactaacgaagttggggaaaaatacaggccatataaaggaggactaatgtctccattacacagaaagttcccagaaaaagaaattcaaatggcttttaaaaacatgaaagagtgatcaacctcactcagctacaaattaaaaccacaattaaaaatctatttttatcaatcatatgggcaaagatcaaaacgtctaataacatgccatcagtaagaatggggggaaacagacactaaaagagttgttggaaatacatgctcactcttggaaggcattttggcattgtgtattcaattttagctgtgcagtttcacttctgatatttactccacagatatgtatgagtgcaaagatgtatatataaagttagtcattaaagtgtttgttagcaaaatttgtgaataaactaaatatccaccactacaaattttcttaaataaattatggtacattcatgcaaagaaatgctatgcagcagttttacaatatagagtggctatagaacaagaagtagtaaggaatgatctccaagatataatgtgaagtgaaaaaaaagaaagtgctgaagatgtatagaggatagtaagacaaagtagatagatatataaacgtgcttttcttattcatatatgtgtgcttatgaagcaatacacaagaaattggttatattgattgcctctgggaagtgaacataagaaactggtatgaagaatgaaaacaagatttacttttaacgaatacttttttgaatcatttggattgttttaaccatgtgtatgtattaacttttcaaaatgacatcaactgatctttgacaagagcaccaagaatacacaatgaggaaaagattatctttccaataaatggtgttgggaagacaggatatccatgtgtcaaaggatgaaattggacccctattttataccataaaaaataaactcaaaatgaattaaagatttaaacataaagacttgaaattgtaaaactactggattaagaaaatgtggcacatatacaccatggaatactatgcagccataaaaaatgatgagttcatgtcctttgtagggacatggatgaaattggaaatcatcattctcagtaaactatcgcaagaacaaaaaaccaaacaccgcatattctcactcataggtgggaattgaacaatgagaacacatggacacaggaaggggaacatcacactctggggactgttgtggggtggggggaggggggagggatagctttaggagatatacctaatgctaaatgacgagttaatgggtgcagcacaccagcatggcacatgtatacatatgtaactaacctgcacattgtgcacatgtaccctaaaacttaaagtataataataataaaataaaaattaaaaaaaaaaaaaactagaagaaaacatagggggaaagcttcatgacattggtcttggcaatgacttcatggctatgacaccaaaagcgcaggcaacaaaagcaaaaatagaaaagttggactacatcacatttaaaacttctgcccagtaaaggaaacaaccaatggagtgaaaaagcaatctatggaataggagactatatttccaagccatatatccgagaaggggtttatttccaaaatatataaagaactcttataactcaacagaaaaaaaatagtacaactgaaaaatgagcagcagccgggtgcggtggttcacgcctgtaatcccagtaatttgggaggctgaggagggcagatcatgaggtcaggagatcaagaccatcctggccaacatggtaaaaccccgtctctattaaaatacaaaaaaaaaaaaaattagccaggcatggtggcgcgtacccgtagtcccagctactcaggaggttgaggcaggagaatcgcttgaactcaagaagcagaggtttcagtgagccgagattgcaccactgcactccagcctggcaacagagtgagactccatcaaaaaaaaaaaaaaaaggtaaaggacttgaacagacatttctctcaagaagaaatacaaatggccaacaggtatatgaaaaggtgctcaacatcactaagcattaggaaaatacagactaaaaccacaatgagatatcacttgacacctgttacaatggctattatccaaaaaattgaaaaaatagcaagtattgacaaaattgtggagaaattgggcccttgcactctatcggtgggaatgtaaaaaacaatttttaaatttaaaaatgcccagcttaacttaaaataatttatcttatggaaataaccagacagttgctaacatttgtactccaaaatatttattgcaatatcgtaataaaaaattggagatgacttcagtgtccaataatagacaattggtttaaatgatatatgatatatacatgcagtaagaccactttgtaaccattaagaatcaccgtcataaagaatgatttaggggccaagcatgatggctcacacttataatcccagcaccttggaaggctgaggtgggaggaccactggagcctaggatttctagaacagcctgggcaacataatgagattacaactctacacaaaattttaaaattagccaagcatagtgttgcatgcttgtagtcccagctacttgggaggctgggatgggaggattgattgaccctggaaggatgaggctacagtgagccacgattgcaccactgcactccagtctgggcaacagagcaagattctgtctcaaaaaaaaaaaaagggaatgacttaggatatgagaaaatgatcatgatatattattaagtgaaaaaaaacaagcacaaaatcatatgtacaatatgatcatgattgttttcaaacacacacagagatgtttatgggataggagagatgttttccaaatgttagtagccatgttctctgggtggcagatttgcaggtaatgtgtattctcttcttcatacttttctatatagtccataatttctgtgaaaaaatattaattttataattaaaaagcattcaatattatatgaaagggaaataaattcccactggccctatgctgagatgaatgccaagttcctagtccctccatgacgcttagggtcagctttatttttttaaaaaaaaagggctagggctagattccagtggggggactatttgggacacagcataattttggctataagagtcagtgatcccaattggaaggccatatttcagtcccataggatccacatgataaagaacatggagggcagaggtcctgaatccttgatactacctggaattctttctacctatttttggctaaaaccactctttatttccagcaaaagcctctacgacctcctccaaatccaccaaaccttcaaagcctgccacatccaggaagccctgtctgataccatcccctctgccgacataggacatagtgtggacatctctccccagcccctagttatttactatactgtaaaaatattttaaaattattaatcacagctgtggctgggcacggtgactcacacctgtaacctgtaaccccagcactttgggaggccaaggcagccagatcacgtaacgtcaggagtttgagaccaacctgggcaacatggtaaaaccccatctctactaaaaaacaaaaattagccaggtgtgatggcaggagcctgcaatcctagctactcaggaggctgagacaggagaattgcttgaacccaggaggtggaggttgcagtaagccaagattgcaccattgcactccagcctgggggataagagcaaatttccctctcaaaaaataataataatacaataaaataaaagtattaatcacagctaccatttactcagcacctcattttgcaccacatgctatgcaaaactctttacatttattaggtcattcaacctttataacaaccctacgatgaagcctctataaagtgtatagttgagcaaaatgaggcacagtgggacctagttcctcacttagggtatctcaaacagtaatggcactaccaggatgcaaactaagttcagtgatttcaaagaccataacctcaactactatgagatgctgactctttcatggtgtgcctctcagaatcagagatatttttctactggacaggccctgccaagtacccatttctcttgacagcagcaaccaaacttgccttgggaaatcgtcctctttttgtgcaatatttccgggactgtcattcaagatgtcccacctgtcctggtcacatgaccccacctgagccaatcaggcttattgtcagaactttgagcctagaataggtgatgcaagaacagaaaggtcagtggacccttgagccaattggtcattaacccatgattaactggactctatccccagaaccaaacctattgacctcacatgctgcaaaaaattcctggttttgtttagattaaccagagtttgctcagtttagcttggaatcaaaaaccctacctaaaaggactagtgtctgaagtatataaaggactctcaaaattcaaccataaaaaacaaaaattttcaacaaaatactagcaaaccaaattcagcaacatgtaaccaagtgacatttatctcagaaatgcaagattggcttaatgtacaaaaatcaatcagtgtaatacaccatattagtagaataaaggacaaaaatcacatgatggtcttaatagatacagaaaaggcatttgacaaatccagtaccttattatgatttttaaaaaaatacttcacaaattagaaatacaagagaactttctcaacctgataaaggccatctattttttttaataatccacagctaacaatatatttaatgatacttaatggtgaaagattggctggctttctcctaagatcaggaataaaataagaatttccactcttgccacttctgttcaacattgttctacaggttctagccagagcaattagacaagaaaaaaaaagacatccagattgggaaggaagaagtaaaactatctccattcacaaatgacatgatcttatgtagagagaaaattctaaggagtccgctaaagaaattgttagaggctggccacagtggctcatgcctgtaatcccagcactttgggaggccaaggtgggaggatcatctgagtccaggagttcaagaccagcctggcaacatagtgagacccccccacacacaagaaataaacaaaattggccaggtgtggtggtgcatgcctctagtctcagctaattgggaggctgaggtgggaggatcaattgagcctgggagccaaagtggcaataagccaagattacacccttgcactctggcccagatgacagagtgagaccttgtctcaaaaaaaaagaaaaagaaaaagaaaagaaagaaagaaactgttagaactaattaaggagttcagcaatcttgcaggttacaagatcaggatacaaaaatcaactgtatttctacacacttgaaatgtatggtccaaaaatgaaattaagaaaacaatttcttttacaatagcatcaaaaagaataaaatacttaagaataaatttgacaagagaagttacaccaaaaaccacaaaacatcattgaaaaaaagatgtaaataaatggaaagatgtaaaaaaaaaatggaaagatacctgacattcatgtattataagaagtaatattgttaagatgacaatactcctcatattgatctctggaatcaatgtaatttctatcaaagtctcagttgtctttttgcagaacttgacaagatgattctaaaaaaataaacatggaaatgcaagaataggcaaaacaatcttgaaaaagaagaacaaaactggaggactcacatctcaatttcaaaacttactatacagttacaataatcaggacattatggatctaacataaggatagaaatatagaccaatgaaatggattctgaaattaagaaataaactctcacattatggtcaactcattttcctgaagggtaccatgacaattcaatgggaaaagaatagccttttccaaaaatggtgctgggataactggatatccacatgcaaaagaatgaaattgggcccctacctcacaccacgtgaaaattaattcaaaatcaattagagacctaaatgtaaaagctaaattcataagagtcttatagaaaacataaggaacaaattgtgtccttggattaggcaatggtttcttaaatataacaccaaaaacccaaacaacaaaagaaaaataaattggagttcatcaaaattttaaacttttggccaggcatggtggttcatacctataatcccagcactttaggaggccaaggtgggtagatcatgaggtcaggagttcaagaccagcctgggcaacatggtgaaaccccatatctactaaaaatacaaaaattagctggtcgtgatggtgggcacctgtaattttagctactcaggaggctgaggcaggagaattgcttgaactctggaggcagaggttgcagtgagccaagattgtaccactgtactccagtctcggtgacagagtgagactcagtatcaaaaaataaaataaaataaaacttttgcacatcaaaggacactataattaaagcaaaaaaatccccataagatgggagaaaatgtttgcaaatcatgtatctgacaaggagcttgtatttagaatgtataaagaacacttacaaattgaacccccaaaagccaaataagccaatctaaaaccaggcaacgaatttgaatagacatttctctaatatatgcaaatggccaataagcacatgagaagatgctcagcatcattagtcattaaagaaatgaaaaccaaaactacaatgaaatactacttcgtaaccactaggatgactataatcgaaaatgtgaaaaacaacaaatgttagcaaggctctggagaaattggaaccctcatacattgctggtaggaatgtaaaatggtgcagccactctagaaaatattttggcaattcctcaaaacatatggttatcataagacccagtaattccactcctaggtatataagcaaaagaattgaaaacacaaaaatttggccaggcacagtggctcacacctgtaatcccagcactttgggaggccaaggatggtggatcacctgaggtcaggagttcaagaccagcctggccaacatggtgaaaccccatctctactaaaaatattttttttaaaaattagccgggcatggtggcaggcacctgtaatcccagctactcaggaggctgaggcaggagaatcacttgaacgtgagaggcagatgttggagtgagccaagatcatgccattgcactccagcctggggacaagagcgagactttgtctcaaaaaaaaaaaaaaaaaaagagaacccaaaaatttaaacataaatgttcatagcagcattattcataatagccaaaaagtggaaacaatataaatgtctactcactggtgaatagatcaacgaaatatggtatagccacataatagaatattcattcatcaaatgggatgaagttctgaaacatgctacaacatggatgaaactcagtgaagaaaagcagatacaaaaggtcatgtattgtatgattccatttatatgaaatgcccagaacaggcaaatccacagagacagacaatagatttgcagttgccaggggctgcagaaagagagggatggaatttgactactagtgagtatgaggcttcattctggagtgacaagatgttctgaaattagatagtgatgatagatgcacaacttgctgaatatactaaaaaccactcagtcatacactttaaaagttcatacatgaactttatggtatgtaaattatatctcaataaagctgtaatttaaaaaaaaagagggagagactgctcgaaaaaataaaaaacctcaccagtaaaaaagtaaacaatcaaattaaaaaataggcaaaaaacacagagagacatttcgccatggagtacatatgggtggcaaataagcacatgaaacaatgttcaatatcactagccactggaaaatgcaaatttaaaacacaatgagatatcactacacacttatgagagtgactaaaataaaaaatagtggcaacaccaaatgctggcaaagacgcagagaaactggatcactcacatattactaatgggaagataagatggcacatccactctggaaaacagtttagcggcctgttataaaaactaaacatactgccaggcacggtggctcacacctgtaatcccagcactctgggattacagcaatcttgcacgttacaatatccgccaaggagggtggatcacttgaggccaggaggtcgagaccagcctggccaacaaggtgaaagcccgcctctactgaaaatataaaattagccgagtgtggtgacgagcacctgtagtcccagctactcgtgccacttcactccagtctgggtgacagaataagactgcacctcaaaaaaaaaaaaaatacaatgaccatacgacccagcaattacactcttaggtatttatcccagaaaaatgaaactttatgttcacatataagtaaaactgtataaaaacctgtacttgaatgttcatagtagctttattagtaatagtcaaaaactggaaacaacctggatgtacatcaatagataaatggttaaacaagctctggtatatctgtaccatgcaatagtacttagcaataaaaaaggaattaattattaataaacacaacctcaatgaagctccagataattatgctaagtaaataaagccaatcccaaaaggttataactgtacaattctatttatataggatttttgaaaagacaaaattttagaaatggagagcagattagtgggggctggagagcaggagggaggtgggtgttggtattagagggcaacatgagagatcctcatggaaatacaactcttatgtataatattttgactgcagtagtggatacacgaacccatacatgtaataaaatggtatataaccaagtacccacacacacaaacacaagtaaagctggggaaatattaacaagtgctttgtattgtatcaatgtcaatatcctaattgtgatattgtattaagtttaataagatgttaccactgggggaatatgggtaaaggatacacagggtctctgttactttttacaactacatatgattcaacaattgtctcaaaataaagtttaattttaaaaacctctacctggctggctggctgggtgtggtggctcacacctgtaatcccagcactctgggaggccaaggcgggcggatcatgtggtcaggagttcaagaccagcctgaccaacatggtgaagccccgtctctactaaaaatacaaaaattagccgggcttggcggtgggtgcctgtaatcccagctactcaggaggctgaggcaagagaatcacttgaacccaggaggcagaggttgcagtgagccaagattgcaccattgcactccagcttgtgcgacagagcaagattctgtctcaaaaaacaaaaaacaaacaaacaaacaaaaacctaccttatatatgatagaaagaaggaagggagggatggaggaaagaaaagtaaattcatttactatggatttaccttgtttcagaatccaggctctttaacatgtggctggagataaatattatcatccccattttatagatgatgaaactgagtctcagagaataactgtctcattctcaaagatatcctttgagaagtcaagagtcaagccctgctctctgtcagtctgctgtcatgctttagccaaacacagccatcaatcaaatgtaggcaaagactgctttactcaagaggaaattgaagccagactgtaagatgcagtccacaaaattcatgatttcttcccccaccccggctccatctacttggtccctttttcatatggattgggtttttatttctgcatttattgcacacacaaattacagatgagagcatcgactacacaagtcattactcagagtagcatcttcccaactgccactggactaggaccgaacagcttgtggttaatttgctatataatcactgcctgtgacggggggcagggctgagcctgtgctaatattaggaaaagggaagctgagtagagaggactcctggggcatgaagagtgagggtggtatcaaaccagggaaaaaggaagagtgctggtggggagcaggaggagggggccctaccccactgagagactccaagaaggatctgctcctctgccaaggaatagaagtgctccgtcccattcatcacgtctgcatggaagagctaaccagaatcccaattctcctaacccctgccatttcctggccgctgccactgctgcctcctcacctcagagcagggatatttgtataccacgctgcatctgctgggagggacacttatagaatggttcatgggcaggaggaaacttaccaacaggcgggagttacagccaccatactagcgttctaataactcaatatgaaaaatggccaacaatccaataaaaaatgggcaaaggatgtgaacaggcttaggaaacttaacctctaaatagacaaaaagacgttcaaccttcatcttaataaaatgtaaatgtcaattaaaactacaatgaaatacctttatttttacctatcggattgacaaagatcaaaatgtttgatcacacactgtgctggccagactgtagaaaaaccagcagtcccaaaggttggtgggagtgtaaattggcacagttttcatggatggcaatttggcactctctttcacaatttttgatgcacatacccattgacccataaattctactgctctaaaatgtattccaccagacatacttgcatatatgtatgcaaagttggatgtacaaggctattcagtgcagcacggcttataataacagaagattggagacagcccgaatgtccatcaagaggggactgcttaaataaattgtaatagagtcatacaatgggaatctttatggctgttaaaaaagaatgaggcagctttctatgtatggatatgaaacaatctccaagatatattgttaagtgaaaaaaaaagcaaagtgctaaacagtgtgattagaatgctgctatttgtgagagttttttaagaatacatacacatatacatctatgcttatatatgcagagaatccctcggaaggatgacattatttgcaatatttgattctgtagaaggaaaagggttctcaaggctgagaacaaatagagagggaggcttgtttttcatcatttgccctatttactaatttggtctgtagtgaataagcacatgtcaccaattgtaattaattagtaagagttgtacttttaatcctctcttggttcctcctgcccaagaatcaaatcttggcctaacacccaaggcccttcacagtttgacttgagcctcttccccttcatttcctgacatgccacacctagcacactcccctctaagcacactgaatttctcaacttcctccaaatgcaccttgctttttcacaccgccaggacctttacacctgctgttttccatgtctgaaatgtccctccacacccccacttgcttttttttttttttttgagatggagtctcgctctgtcgcccaggcgggagtacagtggcgcgatctcggctcactgcaacctctgcctcccacgttcaagcgattcttctgcctcagcctcccgagtagctgggactataggcatgtgccaccatgcccagctaatttttgtatttttagtagagacaaggtttcaccatattggccaggctggtctcaaactcctgacctcgtgatccacctccccttggcctcctaaagtgctgggattacaggtgtgacccaccgcaccttgccccccacttgctttatacaatcttactcatccttaaagacccagaacaatcatgacccccagagtgtggccttccctgacctcaccaaagagagttaatccctctcctctgcactcccacagcaccctagacaggccttcataactggcgtggcacctggacaagaatgaacttacctctgacctatttgcaaaagagggctgctgatttggtctgtccccactgggcgccagcatctgccagcaagggtctgcacaatgtatgtatacgatgtgcccacctccccaaagaatgagaaacagagcagactctcacagcatggttcaggaaaaaaaggtcccctggacccacaagtggagacctcaatgcacatcaacttattgaaggctctgagcaactatcttagtttgagctaccataacaaagtttcatagactgggtgacttatgtacagcagaaattttttctcacaattctgcaggctggaagtcccggatcttccatggtgccagcatggttctggtgaagactcttccagggtgaagactgctgacttcttgttgtatcctcacatagtggaaagggcaaaagagctctcggaagtctcattcattcaacactaattccattcatgtaggctccacactcatgacctaatcacctcccagaggcccaacttcctaacaccattgctttgaggattaggatctccacatatgaattttggggggacataaacattctgtccataacagtagttctgcaaggaaaccaaagctgttaaatgtatttagccagcatacttctcactttctaaccaagaatttattcccttggaatgcctattaacatcccatggagctattgttctatgggcaagaaaacttttgtgaagtgttgatctatagaaatgcctacaggacttctctaattcagaacttttggccaggtgttgtggctcacgcctgtaaccccagcactttgggaggctgaggatcacctgcagtcaggagtttgagaccagcctagccaacatggcaaaaccctgtctctactaaaaatacaaaaattaaccaagcgtggtggcacacacctgtagtcccagctactcgggagggtggagcacgagaatcacttgagcccaggaggcagaggttgcagtgagccaagatcgcaccactgtactccagcctgggtgacagagcaagactctgtctccaaaaaaaaaaaaaaatcagaactttacatggacaataatgggatctggaatgttgaaactcatcttgaatgagatctccatgcagtctgctaaccagttaaactataaatcccacagttttaataaatgcaaagtgtttccagtttagtagcccagttgctcctttctaaggaattggtgacttcccaagaaatagaggttagggaatgtctccactggttcaggacttctctgactcttgtttgccattaaggatgttcgggatctggtgttgtttagtaaatatcccatcccacctcttgcatgggaatagtctctgccttgcatcagggcttttaactccattaaatccaattgcagaaaattctcagactcagctactcatcacactcactcttggcagagttttatctctgtggctccagttatatctactctcaatgtcaaaagggtcaagaacaatctcttccatcagacactgaacaggacctgcctccagtttcattcactcaaaaatggggtctctcttcttccttccttttgatctgttccaagtgtctccctgctgagtgtcatgggaagggacttggtgccccagtgttttggttggaagattcacttccaaactgaatccaacttgaagaggcttccccactaggcagagagggtgaaccttaggtgcgttgagggtatcactccctttccatgcgtcttcaacctcagcctccattcttaactattcaccctaaccacatgcactccacttctcactgcacccaagtctcctctggactcaccatcctggctatggtcttgctaagcttgttagagttaacctttggcctttcttttcagcttcctcgccaagccccctttttgataactctggggaaatgccccacttggcccagccatccaggcatacagctcctcagtgcagactctcatggcttcagagtactctgcttctagacaggaggtggaagaagaaagggtggagaaggtagattcacttcttaatctcctcagcctaaaatcagcccaaagtctttctgctcatagttcaccaatgaaaactagtcatgtgatccctatgatatgaaagggagtctgagaggtataggtcctgtctgggtagctgccagcatgaaccctattctattaaaggggaagcatgatcttttggaggtcagctagccacctcttcctcactatgtcattcctgatgttgatgatagaagtaataataaccaatgctattggcaataataataactgctcttctgcattaagcacatcctctgacacaatctttgtgctgagagttttccaggcatcatgctactcactcttccatccttcctgtgaggttagaagacttctgcttcagattctctaagaatgaggtcagatcctgttccactctgcactcagtagacatactcatgccatggtcaactctcatatctatgccgtagaggcagtcatgctacctgcccctcagaccctgagaaaggaacagaggccatcagaagggagtttctgctcatttgaattatatgtcacagaggctaagaccccaccaggttgacaagctaggcctgggttctgagtcttttgaaaattccctgttggggaagcgtatcctcagcctgcttgaactcacctactgtgtgcacccctgcaactgggctaaccatcaagagcccccccccagacaggggagatccagccagaaaagttgttaccatcttcactctctgtggcctcctcttcctatatcaggaagtcgccaaatggtgaccataaaaatacatctcccctttttctacggcttatcatcaggggaatgaatgaggacccacgtcatccaaagacctgaaggcaggtgggagtttgcctttatactcaaaagcaagagctgattccctgtgtctgcacttattgggccaatgatgcacacaaatattactgcattttacagatggagaaactaaggagtgactatgttaaagtcaagagtatgcagtagcggagctgggaaagatggctgaaaggtgggtttggctcaagataggggctctcaaagcactttgcctgagtaccttgagcttcctactcagatgtgttgagtccacaccaatacacaagtcttgggcttgaaacccttcccaggcagatcagaggaagtgggggagtggtctgcaacctagaagcagctgcacaggcagcagatggtaacggctgcctctcagatggttttttgtcacatagctttttttctttcacattatgaatttttttctgaaatcctctaaaaacattgtttttatagtaacagaggtggctgtatgtttctgagagatccagatcccacactcagtctgtcagcctgctgggatctttgcctttgtgacatatgaataaagtaagttcaagctcgctgctgcaaacagtccctggaggtgggctgcctcctcttcccagtagctagaggagccctaggattctggagaaccgagccccaagaccatcttgtcccgagtcccaaagataatgggcagtaatcccaggagagcaaggatacagagggacaaggcccctagagtgggtgggagttctgggctccaaatatgtgtgagtcttcataggaaggaaccaagagcagcataacctcaaacaagtatttaacctctctaagcctcagtttcctcatctgagcatactgatgctgtctacctcctgagattgcagggagaactgaattatgcttatgaaagggcctagcacagcacctagctcccactgttttctcaataaagactggctttgataattattttgtttgataattatttggtaattatcctaagccacaggataggaaaaataagcaataatgcaaagaccagagatgatgagagcctcaagcccagatgaaggggtcatgggtagacagactgagtcagagaggtccttgaccttacccagcaggaaggaggggctattcccaggtgagccaaggctgtgaagaaggactttggcctctaaacctcatgcccagtttggcccccacctcaattcttgttcccactgcagagaaatcttcttgcacagcctggcaggttgtaccttttaatagaggaaatactggaaacataggtgtgacatttcctatcctataaatatgccctctactcagagccagatgatactgagaaggacatccttcatgctgctacacagcatgtctgtagcctgtacagagggagtgggggtgagggggcccagtgaggcatgatagttgacctcataagcagatacttttcatggggatcaagctgtcagttttgcagggggacctgggaactctcagactgggggcattgattccaggagcctggatgcaatccactgacctacagacggaccacaggatgtgctgctccctggtgagtgggcttgagggtatgctggccccttacatgacccttgggtcaggatacgaccctcagcttgtgctggactttgaactaccaaatcctatgggtcttccagatgataaagcctcatttaaacagaatctttccaacatcccaatgattggaagatgatgattctcattttacagagatagaaaagagggagggtgaaagacggaaacattcttttttttttttttttttttttttttgagatagagtctcactttattacccaggctggagtgcaatggcatgcttaagaatcacttcagcctcaatgtcctgggttcaaatgaccctcccacctcagcctcctgagtagctaggactacaggcatgcaccaccaggtctggctaatattgtgttttttgtagagatggggtttcaccattttgcccagctggtctcgaacccctgagctaaagcaatccacccatcttggcctcccaaagtgctgggattacaggcatgcactaccatgcccggcctcattcattcctttatttatccaaccaattacttcaatattgataatctaatatattccaggtacagtgcatacactcagtacagtacactgaggcataaagaagtaaacagggtaggcaatgccctgctctcatggagcagggagataaacaattaaataatcaaataagaaatatgttattcattatttaatgtgactgtgcaaaggatatggggtaggttgaatgactggctccaattctccacccctctatgtatcaagctttttcaatataacattgcaatccctcccatccatggactttggcaaatttgggcattgttttggcccatgagatgtgagtagtcacgacataagcaagaatcttacatgagcttgtacaaggaggcttaccctcttacactttagccatagccatgagaacataccctgcctagcctgctgatcccaggagatgaacaagaagtggatgagagctgagccaccaacccatgaatgaaataaatacttactattgaatgtcactgagatgctgtgctatttttgctgttgttacacagcagtagcttaacaatgtggagcatgattagagataatgagacaggaaggtaggcaatagagaaagactgaatttagatggaggataagagatgagtcagtttcgctgaaaaagaaatattgaaacagaaatatgagtaactcatagatacacaagaatgcaaaagtggggagaagagcttcacaggcagagggaatagcatgtgcaaaggccctgaggtaagaaggagcaggatgcattccaaaaattcaaaaaaggacagggagcaaggaggccagggagcaagggagaatgtggtagcagatgatgagatcagaaaggaagttgagtaaaggaccatgcagacatatagcatgacataaagtttgcattttatctaagggcagtgggaagctaatgaagggtgttgagcataccagcacctgataaaaattccttccactgctgagtgaacaatggattaggggtaagacaagagtggggaaagggatccagggaggaggctgctgcagccaccaaagtggcaggtgttggcccaggattggcagggtactgtagagatagagaaaaggggacaaaggcagggtgtggtggctcacacctgtaatcccaacattttgggaggccaagatgggaggatttattgaggccaggatttcaagaccaacctggccaacatagcaagaccctgtctctataaaagagagagagagaaaagggaaaaaatctgaaaggtactttgaaggtaaaggtaacaggactttttccaaaaataggcctacatacacatgtcagttgacttttgaaaaacgtgccaagtcaattagatggagaaagaaggcagaaaagagagaaaaatcaatccatagtttgtaccataattaaaaattaattcaagcccaggcttggtggcccacacctgtaatcccagcactttgggaggccgaggtaggcggatcacctgaggtcaggagttcaacgccagcctgaccaatgtgatgaaatcccatctctactaaaaaaaaaaaaaaaaaaaaaaaatacaaaatttcgccaggcatgatggcacacgcctataatcccaactactggagacgctgagacacgagaatcacttgaaccctggaggtggaggttgcagtgagccaagatcacgccactgctctccagactgggtgacagagcaagattccatcccccaaatatataaataaataaataactcaaagttgagcataaagttgacttcattgatattgtttaaatttctacttcagaaaacactatcaagaaaatgagaagaattagagtgaaagcaaaaagacttctctacagaatgaaagaaaatatttgcaaatcatgcatctcataaggttctaatgtccagaatatatcaataattcttacaactcaataatagaaagacaaacaacccaatttaaaaataggcaaaagatttgaatagatattcttcaaagaagatatacaaatacccaagaagcccatgaaagcatgctcaacatcattagtcattagggaaatgtaaatcaaaaccacaacaagataccatttcacactcatcaggatagctatcatcgaaaagatgaacaataacaagtgttggtcaggatgtgcagaaattgggaccctcatacattactggtgaagctgctttggaaagcagtttggcagttcctcaaaaagttaaacattgagttaccatgtgacccagcaattctattccttggtatatacacaaaaggaaaaaaaaaagttctcacaaaacttatatgcaaatgtctgtagcagcaattattcctaatagccaaaaaaaattgaaacaaccaaaatgccaaccaattgatgaatggataaacaaaatgtgatttatccatacaatattcctgaatttaatattcagcagtaaaaaataatgaagtattgacacatgctaccacgtgggtgaaactttaaaacatcatgctaagtgaaagaagccagtcacaaaggatgacatgttgtatgactccatttctatgaaatatcaagaatggttaaatctatagagatacaaagtagattaatgtcttccaggggttggaagaagaggggaatgggaagtgcttgctaatgggaagggagtttctttgtattttttattatctcatagtaaagctttaataaacatcagtttccatcctcccagttctagccaaattactttaataaaatatatctgtatatacagttttttcagcttttattttggattcaaatttggtacatgttcaggtttgttacatgggtatattgcatgatgctgaggtttgggatatggatgatcccatcacccagaaagtgagaggtagagaaccaataggtagtttttcaggccacatctcctctctactcgagtggtccccagtgtctattgcttgtgatggcatttcatcgggggcgatgagaatgttctggaattagagagtgatgattgtacaactgcatgaatataccaaaaaccactaaatggtatgctttaaatgggtgaactgtatggtacataaatgtatggtacataaattttatctcaatgaagctgttaaccaaaaataaaagagcatagacctaatgtaaagcctaaaactataactcttcagaagaaatataggagaaaatccttgtaagtttgagtgaggcaaagatttcttgtatatgacatcgaataagaaaaacaagtgataagttggacctcattaaaattaagaactattattctttcaaagaagacactgttaagagaatgaaaaggaaagccataggatgggaaaaagtgtttgtaaatgacatatatgataaagaatttatattccaaatatacaaaactatcaaaactcaataataagcaaaacagcccaatattttttaaaataggcaaaaattgtgaatagacacttccccaaagaagatattgggatggcaaataaccacatgaaaacaaggttcgacatcatcactccttagggaaatgcaaattaaaatcacaatgagataaaatgaagtattctgtcccccacaaagacttgtacacatatttccacagcaacattggttgtaatagccaaaagctggaaaaaatacaaatgccatcaacaggtgaaagaatcaacaagaagcggtatacccatacagtgggatactacccagcaattaaaaggaatgaactactgacacatgtaacaatatagatgagtctcaaagtaattataatgagtttaaaagtcaggccaaaaatgcatactgtataatttcatttatataaaattctagaaaaagcaaactaatctgtagtgacagaaagcagagtggtggttcactaaggatgaaatacacgggagaggtgggaggggcaggagggagaatatcaaaggatcataaggaaacattgggaagggatggatatgtttatttattatcttctgtgtggtgatgctctcccaggggcataggcatgtgaaaacttttccagttgtgcatttcaaatacgtgtattttattgtatgtcaattgtacctccataatgctataaaaaaattaataggacttgttgatgaactggatatggaggtgagagggggagaaatgtcagggataacctccaggcttctggcttgagtcaactgttggatggaggggcagtttcctgacgggaatgttcaaaagaggacacggttagggtgccttagcacatggcagagaggtcaagaacagagtttttgagatgtgaaatttgatgtcccattgaaaatgtacagaatgtggttgtgaatctgagcctgtggctgaaaagagagatcatggttcaagaaaaggaagaaggggccaggcacagtggctcacatctgtaatcccaacactttgggaagccgaggcggtcagattgattgaggtcaggagtttgagaccagcctggccaacatggtaaaactctgtctctactaaaaaatacaaaaaataaaaattagccgggtgtggtggcgcttgcctgtagtgccagctactcgggaggctgaggcgggagaattacttgaacctgggaggcggagtttgcagtgagccaagacagcaccactacactccagcctgggcaacagaacaaaacttcatctcaaaaataaagggggcgaggcggggagagggaactcatgcagggaaaaccgtgagccaagacatggaggatgggaacaagggggaggaacagaaagggagtccttcactggggtggggttagggcaagaagcagtgagcagagagggagcccccaggtggctgtgttgggacctgctggattcacagggcagggaggatgacaagctctgggagtcctagaaagggatttgatttgaggtgttgggacaggagaaatgaagccatcagctttagagctgccacatcccgttgggacattccacagggagctggatcctgggatctggatgaccaaggagagatgtggtgcagagagggatctagggcttccctggcaagagtatgttggcccaggaggagtgggggtggtggaagagaaagatagagatgcaggagctctcagagaagccccaggagagtacgtgagaatggagacggcatcaggctaggggcaaagtagggtgacagccagacccacgaagtccccagaggtcttacaggaacatctcagggcaaggacccagagcagtgtgtgccaagggctggtcaccagagctgaaaagggagatagccttggaaggagggagatgtgctggtccctacaaggctctggcatatacatctcctcactgagtgctcacaactcctttatgagatcaccgtaatcatctgcattgcacagacaagaaaactgagaatcagagaggttaggagacttctcccaaggccacgaaccttgtatctcatccacatctgggggctcacacgctctttttaggcactagggtgcccagaaaaaggttcacaggggccaccaagcaccaactaatgacccccagggtggctgtgcacaagcatgtctgaggcagttagatgaaggagggagcgcagctaattgcccgtacaaattaactctaatgtggtcggcatcgacatacttatctttctttaattacattaatcaattaatgaagaagatggcttcctcttattatgatttccaaggcccatatgttctcgggagtccagctggagttgggcttcttctctgtccctggcttgaatggagaactgagtgacatcaataagagaaattgtcccccaggccttctccaccctgaagctgatcttcaagatgggagaggtaagaaaacagaagcaatgatccccggaaatggtaaccaatgggagaggcctaaactccttgactcagcattcaaggcccttctccaacattgttcatggttcctttgacccaggtttatcagcctgggcagactgattttctctgagctgcccttgcatcctccagcgtccaatgcattcatgccatttcctctaccaggaaggccagctcccatcagtcagggtccaggtcagtccagtgggtttgtcacctcctcatgagaaccctatagaaggcctaccctgcagtaatctccttcacttgttaatttttttcagctttatttaggtataattgacaaattaaaattgcatacttttaagatatataactggatgtttgatatacatacacattatgaaatgattaccacaatcaagctaagtaccatacccatcacctcacttggttaccattttcttttcttttttttcctctgtgtatgtgtgtgtggtgagaacacttaacatctaccctcccagcaagtttcaaatatgcaatatagcattggtcactatagtcgcccggctctacattaactctccagaacttgttcatctggcataactgagacttggtaccccttaaccaacatctacccccagccccgggcagccaccattctactccctccttctatgtgttcggctgttttagattccacatgttagcgaaatcttacagtgtttgtctttctgtgtctgacatttcacttagcataatgccttccaggttcattcatgttgttgggaatgacaagattttcttcttttataagtttgaataataattcacatttattattcacattttctttatccatttatctattgacagacatttaggttgttttcatatcttaactactgtgaatattggtacagccataatggaagacagtatggagggtcctcaaaacattaaaaatagagctaccatatgatccagcaatcccacttatgggtgtataaggaaataaaatcagtattgcaaagaaatatcctcactcccatgcattcatttttcattcaacaaatatttacagtccctccccttgtgtaacttctaaaccttcgggacagacagacactaaacagacaaataattacatagactggtggttctcgtccactagaatcatcaggggagcttttaaaaatatgctgctcacgtgggcccagtggctcacacctgtcatcccagcactttgggaggccaaggcaggtggatcacttgaggccaggagttcaaaaccagcctggccaacgtggcaaaatcccatctctactaaaaatacaaaaattagccaggcgtggtggtgcaagcctgtagtcccagctactcggaggcttgaacccaggaggcagaggttgcagtgagccgagatcacaccactgcactccagcctgggtggcagagcgaggctctttctcaaaacacacacacacacacacacacacacacacagagacacacagacacacacacacacaaagtgtgatgcttaagcttcatcccagaaaaactaaagctgaatctctgagggcacaagctgggcatcaattatttttttaattgcctaggtaatgctagtgtgcagtcaggctgacatgctggcatgggggataaaggagggtaattgtaaggagggtaatctgcaatgctgccacccgggcttgctttccctagaggttttgaaagtatgatcagtcaattgtgttttttgtaattatttatttaaataagataaacttatattagccaccccgtcttccatgtataaagaagtcacaaattacttagatcagtgcttctcaaactgtagcaaacatcggaatcacctggagggcttgttgaaccagatcactgggcaccacttcgagcccaagaatttgcatctctcacaagttcccaggtgacactgatgctgctggtctggaaactccactttgagaaacactgaattggagcaaggtttaaagaaattcaagtggttgagcaccttccttcctcactaaacatctgctgttcacagactctgtttaaccaaactctgctgctttctcgcaagctgatgtagaaagccttcagatctcctttgttaggagaagaagctgtgaaaaatcatacctctccatcatacatgtgcctgttttcactgcaggatgtttcacaaccacattgcttcagagcaggcaacttctcttctttaactgccaatttctcatcacagcagtggctgtcagcatcagcatcactggacacctgttagacatgcaaattcctggcctactccaggcccacttaatcagaaactctgggagtgaagcccagcagtctgtgaactaggaaatcacacaggtgattctgatgtactctcaactatgagaaccactggcctagaaaaaaacgtgttaattgccccttcgaattcttcaggatcctattcactctgattatttgtatcatttctttcataaaaataataataatttgcttccatttgtcaagtcttcctatgtgccagggactgtgctaagtactttacattaaagatcttatttaaaccttggaacaacccaatattcattatactattttatagataaggaaactaaagcttggagaggttgagagttcggcccacctgttaagtggcaaacccaggaaaacactgctctctgccccaccccggttcatcttttccaaacattaggcattgtattaagtgtgttctcacactgctataaagaactacttgagacggggtaatttatgaagaaaagacgtttaattgacccagttctgtaggctgtacaagaagcatggctgagagacctcaggaaacacaatcaaggctgaaggtaaaagggaacaaacatgtcttaccatggcgagcaagagaaagagagtgaaaggggaagtgctacacactcttaaacaaccagatcttatgagaactcactatcacaagaacagcaagggggaaatctgcccccatgatccaatcacctcccaccaggtacctcccccaactttgggaattacaattcgacatgagagttgggtggggacacagagccaaaccatatcaggcacttatcacacccatatggctgtggtttatacctccattgtagtgctttcccccagtcataagatttgtttaatatctcactacttttttctacccaaatacctgctttttaaagctagtgttcattttcttaaaaaaaactaattgttgaaatgttttaaaatcatctgtttgctgccctaactgatatcatgcatttttcttttatgaaaattgtaaagctcagttaaatgtttaaaatgcaaagagcagacacccaagtttccttactggaatgaaatgtaaatggaaagtggcactccacaggtacaactaccttaaggtccatattgcttaaaagagtggaactcaagagccaggagccatgacttgcaccagtagtcccagctacttgggaggctgaggtgggaggattgcttgagaccagctcaaagcctcagtgaaccatgatcatactactgcaccccagcctgggtgacaaaaaaaagaatggaactcaacgtgaaaagtatgtgacctcaagtccaaacagtcattctccaatacattggaagcctattactcacatccgaaggtgttttaatcagccagtcaacccgttatctaccatgtggatgaagtggtcaacgtgactcacctggaaatgtgctacgggatagagattattccaaaacatggcaataactacctggtgtcttcagcaggagtaatgtgcaactactctgtgttacaatcacagacagcctacggtgaccaacaggccccagtttgcccaggactgtcccagttttgacactgaaagttctgagtcccagaaaacagttggccaccctaacagcaccatgcttgactcacatcaaggtgcatgagaaggagtttctgtttccctttggccagccaggggcctgggtctagggctcccatggggcaggacactctggccaggatcagtgtcaaagaactgcctagcagaaggaatatgtcttagttccagctgctctagcaaaatactgtaatctgggtgggtttaaacaagtatttatttctcacattgctggaggctggaaatccgatatctctcttataccctcaaagagagagctctggtgtcttcatcccttcataaggggcaatgaatcccatcaggatatttttctcatgtcctaactactgccctaaagccctgcctcttaataccatcatattgaagatttagtcttcaacatataaatttgaggggacccattcagtccatagcagggtacttggggacagaagggaaactagtctgagcagtgaccacatttcctcctaactgccctcccctcccccaggtaaactccagatgattctggggcaggagctccacccccacgtatcaacctcttcctccaatagaaacaaagcccaggccagtcctctgggatgggagggaggggacatcaacagaggacagagacagctgaagactccattcctggcttcctctcggctctcctgtgccacagaaggcagagaaggtgggagaaaatgtccatccagccctaaaaccctgggcctcctgagctggctgggccaccctgctgcccacagtgggtccacaaaagcaggggcttggcagctgagacggtgagctgatgaggccacccatgataggtgggtgcttagtgcacacctagacaatgtgtaagtgctcagtgaatctgagctgtttttaagcagctatcgcccactgggacccaggacgtgcagaatgggctcatcctccctccctccgcctctcctgttcccattgcagccccacctcttccattgctgtgtggctgagagttaccctgagtgtcagttttctcatctacaaaatagaaagagtaatagtcccaacctcacagagtctccctggggagtaaatgaaacagggtgtgtagtagcctactttggacgtagtaaaggctcagtgagatcatcattgtcattcctcttatcaccaagggcacccaggggttggggaggcactgaggcaggaagaggaggggagggtcccacatccttcctcagcctcgaagcaggaggcctgagctccatatcctatttgttctttccacaacaccagtgccgacttctccattaggcattgtagcaattcagtgtccacaacattttagagacccacagaatgttctcatttccttcaaaatcaagtaaaatataaacttttaggttagacagacatgtttcattttcttctttcatcagaaacaaatagaatttttaggacccatgaaaatctattcttgtgggaggggcccatgaaggcagaagcgtctagggcccacaaaagtcacaatgcagccctgctcaaaagacaaaaacaaaaaactgtgcctgggccggccgcggtggctcatgcctgtaatcccagcactttgggaggccgaggcaggcggatcacttgaggtcaggagttcgagaacagcctgggcaatatggtgaaaccccgtctctactaaaaatacaaaaattagccgggcatggtggtgggcacctgtcccagctactcgggaggttgaggcacgagaatcgcttgaacccaggaggcggaggttgcagtgagccgagatcatgtcactgcattccaacctgggcaatagggcaagactcagtctcaaaaaaaataaaaaataaaaataaaaaaatcctgtacctgcctttttttcatccccactgctgcacccgtcctaactcaacccatgtccacctctcacctagacaatgaccagagcctcccagcaagtctcccagcctgtctctgaaatccttgtatctgtcctccacagagcagccagcatgatctgtcgaaatcacaaatctgaccttgcctcctccctcctgaaaacctgctgtgcctctggattgccctcaagacaaaagtccaaactcccctgcaaggcacacaagtccccagggggcactcagctgcactctcctgcacgcgcccagccttcctgctttcacacctccacacctttgcacttacagtgccctctacccagaacaccctttcccccgcaaactcctaaccatccttcaaagcccagctcctctcagagaaattccactcatttgtcatattgtgattttgagtgaatatcacctcgaggtcaaggactatgttttcttccttttcatccccccaaccacctccccagtgcctagcttacagcgactgtctggcagtgtttattgttcccctgaggtcatggtcagcatcggggtgctcctctaacccactgctccctgccccggcaccgctgcagtcctgtgatttccaaatgccaagggaagttctgtggtcctattcatcttttccttgtctggcaggctgggagtgcagcccctctggggcgcacagacagcagagtagccctgaatgggtcaacctttcaccaacaacacccacctcaaataaaagccatcagcttgccaggattggagaggaagcttcaagtccccaagaaaaacccaagggccatgttcagagacttggccagaactgagccctgttcagcctttgtctgtgtgtgacagtgtgcctctctgtgcctcagtttctccatctcataacagtgaattggtctaaagcctcgaaagaaagggttcttccaactccggctgcacagcctcttccagggcctcccatcagcccagacccagttaccaacgcagagggaagagtgccacctactgactcccagcctccctccaagacactgagccaccaaaggagtcagcggaatgtgcaaagctcaaagtgagcagttgtctgcattctccctttgcagagccgcagcaacctcccctttcatggggccaaggggcacccctccagcctggacagagagctttagctgcactgctcacccctgttgtcctctgctccaagccctggaaagccaggcgcctccacgccatcctgcatctgtgccaggcccaacagcacggtagcccccggctgccagcccccctcacactgggccggcggctagaggtggagaacaatgatccctattgtgactaaatttccccctgaagatctcattcaagatgttagagtgagcgatcataaaaggaattaatagttgattcgctgtataatttcctagttcaatatactttagtgcagcaactaaatgaggcgtcccggccgttcagtggggccagatagcgactttatcactgggatctcaggctgaggaataaaagcaattcttctgaagtaattgcgtctaattaaaagaaacatttaaaaagtgtaaccaaaaggaattcatttcaaatggaaaattaatgctgaaaaatagccctgagctctcttgtcgcagctaatagccaggcagccgcagaataattaaactgttttgaaatgtcgataccatcctcatcgggagaagatgggcacggctgagcacatcccgggcatcagcaaagaggatggcttccaaagacatggccagcagttggacttgaggtcagccacaggcttccaggtggggtgaggcccaagtcaccacagacaaggcaggaaaaggtttgtaatacggtatttaatgaaggaaaccccacttcctggatatctgagcaccccactgactcttcagaacaaccctgcaagtcaagtatcattagtagtattatcatcatcatcatcattgccatcatcagttcaaaaaggagactccttgtgactagctaccttgtctaaaatcacagccaatatgtattaacagcaatcaggatttgaactcaggtctgcctggctctgaagtccacatcaattccactacactggatgttaggattcagcatcaggaaaaaggctgtgtgttttctaacactgtcattctcagttctgcctgcattagactcacctgacacccccctgaggagctttaaaaaacagtcccaagccaggcgcggcggctcacgcctgtaatcccaacactttgggaggccaaggcgagcagatcacaaggtcaagagatcgagtccatcctggccaacatggtgaaatcccgtctctactaaaaatacaaaaattagtgggtgtggtggcacatgcctgtaatcccagctacccgggaggctgaggcaggagaattgcttgaacccaggaggtggaggttgcagtgagccttgatcacaccactgtactccatccagcctggtgacagagcaagactctgtcaaaaaaaaaaaaaaaaaaaaccagtcccagactctgccctcaaagactctgcctttattgatctgggaacagcatggggatgagcatttttttttcgagatagggtctcgctctgttgcccaggctgaagtgcagtggtatgatcacagctctctgtagccttgacctcctgggctcaagcgatcctcccacctcagcctcccaagtagcttggactacagacacacaccaccatgcctggataatttttttctttttaaagatggtgtctcaccatgctgcccagtctgtggacatcagttttttgtttttttttttttatgtttcccaggtgacttaactgtgcagctcgggtctagaaccattagtctaaatcccagtcatcaggcacccttcaccccatgaacattccctgaaattttcctgctcacttcccccggggagttttgcctcgtgaaaaatcgaagggtgaacacttcccttacaagtttgcagccaggttgaaatgaactaaaagagactaattgagaaccagcacttagtacatgctaaataaatgttagttttgaaatggggggcagcaagaagtaagaacccaagatgaaatcgtcctaaaggagtcctgaagcagaccccaagggaaggttcttggaccttgagcaagaaagaatttgaggcaagtccatagggtaaatttaaagcaagtttattaggaaagtaaagaaataaagaatggttactccataggcagagcagtggaatggaatgcttgactaagtatacttatagtaactttttggctatatgtttaacaaggggtggattattcatgagttttccgggaaaggagcaggcaattcctggaactgaaggttcctcccctttttagaccatatagggtaactttctgaggtcccatggcatttgtaaactgtcatggtgctggggaggcatgtcttttagcatgctaatgcattataattaccgtataaggagaagtaaggacgacccgaggtcactttcatgaccatcttgatttgggtgagttttggcctgcttctttaccacaaactgttttatcttcaaggtctttatgacctatatcttgtgccaatcttctatctcatcctgtgactaagaatgtctaacctcctgggaatgcagcctggtaaggtctcagccttattttactcagccgctattcaagatggagttgctctggttcaaatgcctccgagaaaatgtctaccaagcattaactatagcttctaactccgttaaaacctggggccaggtgtggaaaactaaatctgaaaagtttaacagtgaagatgatctggccagaaggtttatataccaaagtgaattcagaatgggggaagatcacactagctttagcaccaaatcttacagttttgtttacagttacttgaactaggctaggagttgccttcaatcagtgattatggagcatgctttaatgaactagaagaacaattcgtaatccatgagttgtttattatgctgaaagacactcctaaagaccttgagaatgttccctaaaagtttgtcccccaagtagatttaaacatgcacctaaaccttatttacacccttatgattttcagaaaacaccttctttacacatatgcaaagatcccagtgccccttttctgaattgcaaatacaacccaatttccaaagatcatcagcaagcaccatctgcttcattatggctaaaccccttaaaagggaacccggggtctctaagggtgatggaggacttgggatgaaccactcataagaaaagcatcatcttaccttctgatgaaatggtgcttatagtgaccacaggggattggccaaggctgagggattttcccaacattctgaggttttttttgttatttctttgcctgaggactttctctgtccacaaaagccactttgtccacctctgtggcatgccagaagtgccacacacacacccaaagcagctctcaaccaatgcatggtgaaagtcggtggacaaatgccccagctccctcacctcatgggtggaataactctatggtgtagtccatacagactgccacagttccccagcacgattaagcctcaaccaccccgggagcgctaacaggatgatggcctctttattgtctgccttctcctccctgtctcacttcctcactctcttagctgtattgccttttatctccaagataaactgcttgcatttgagtcaatatctgctaggacaggggtaagaacaatacctttgggaccattgggttagcagttgtggtggagatccactccagtatggcccctgtgcctgctgcatgaaaagaggatgggcttttggagcagagatgcctaagctccaaatctggtccagctatttaccagctgtgtgacttagggaaagtcagagagcctcgctgagcctctctgtcctctagtaagatatgggaatagtaatgggagccactgcaatcagttgttgaaaagatgcattgaaattctgcagactaagcccatggcacaagcaggtgtttattcaaaaagtattagtagatttattccataatgggctctgagtgtggcacagtgaggtgtgcaaaggatgaggccagatcccccttcctggagctcccagggagatcagatgtaaggagattagtcatgatgttgccatttatgctgggaaactcacgggctgggggcagctggggagctgcaccaaggtctccaagagtctagctgtgtggtccaataggaagccaccaaccacatgtggctatttaaatttacattaattaaaattaaatacaatgtaaaattcagttcctcagtctcactagccacatttcaagttctcagtagccacatgtggctcgtggctaccatgttgggcagtgcggatctagaacatttccaccatcgtagaaagttctgcactggcctagtattgacccggaattcagatctagcactgtccttgctggctgtcagatttgggcataggtcctttcctccttgagcctcagtttcttctcctgtgaaatgggctgtactaatcatgtcactctaagcagcgcggttattgcaagcaccaaattaaaagttttcgtgaaaccactagacaagcaccttgtctggaagactctagaagcataaataacgttgaccaaatctacttcagcatttggtcttgcctttcttcatcttagatcccggggtcccgaacctccctgtttttctacctgggccctcaccacactccacttccatccccactccccaatccatcctctgtgatcactgtccctctcatctccaactctgcccacgccttcaggcaatcagcacatagactaagtccttactggggtctgcacagacagaaccaaaggcttggacacatgaagagtggagatcagggaaaaggctttcctgggctctaagagatgagcttggaaaagggatgtccctaaaggcatgttactaagtggaagaagccaatctgaaatgggtacacactgtatggttccaactatgtaacattctggaaaagacaaaactatggagacaaaacaataaaaagaccagaggttgccagagagggatgaataacagagcatggaagatttttagggcagtgaaactattgcatatggtactataatggtgatacaagtcatcagacatttgtcaaaacccatagaatagccaacaccaagagtgaaccctcgtgtaaactatgggccctgggtgatactgatgtgtcaaggtaggttcgctgattgtgacaaatgtcccactcccagcaggatgttgatcgtgagggagcttctgggtaagggtgggggtaggggaatgtgggaactctgtactttccacttaattttgctatggacctgaaaatgctctaaaagaataaagtcttctttaaaaaaaaagatggaactgactttcagtaccttggtccagtgaagatgccaacagcagtaaccagttagaggatggacgagccatcatttggggggcaagtgaaaaagacacattccaaggctcaataaaaaatacatttttttaagaatgcaaaagaaaagatcctgccagagtggaagggagcagcacttagcttagatctgtggcacccaggatgccctgggaccctcctgttcttagccacaccccagcctgaccctacaaagtcaagccttgcagggtagaaccttcataatcttccagccatcatagcccctgtgcctgacactttcatttctctttatttgctcattctcttccttccaccacaccatgctcaaatcatccaaaactttccctttatcactgagcctccctaattaagctaacattattagaaggttgggaaaaaaagaaaaagaaaaccctcccaaattctctttgcgtttcagtagctctttaatatgcgaggcaacgagagatgagctgctcctaattgccagtccctggagtagccagtcagaaaatgaattgatgcgttttttccttatgaacaatgcatgtagcacaaattgcagtggccgtcaccagagatttaattacaaaatatcattactttcacacatcatttcagatttggcctgatcaaatcaaagttagggcgagagggagagaaaactgcactcttagcagggacattcattcaggggtggctgcaacgcgggtgggaattggcattgtcgaaacttcctcggggccattgcaggggaagcagctgccagagatgtctatgcaaagggacgtttctgggattcagggtttcagcagagtggaggctgtgggcctgcaggaggggccccagggcgtgaggagcatccctcaaggaagaaatcaggctgcagagagtcttaggaccctgcaattcaaaggagctacagaaagtcccttcatcagtggctcatgtctccagttcattcattccacaaatatttgttgagcacctagtgtgtgccagatgctgcgccagaccctggggaggcaaaattgtcagcaaacaaacgtggtctctgccttcagcaggttcacactctggttgggaaaacagatttgaatcgaataatcacagcatagtgagagacaagaggggtagtggagcccagactctctggaatttgaattcctgctccatccatccatcagcttacactctgaaaatggaaaaaatataaataacacgaatccctgttccatcctttaacagctgtgtgaccttggcttggtcactcagcctcttggtgcctcagcttcctcatctgtgacatggggaaaataatagactgggtgcagtggttcacatgtaattctagcactttgggaggctgaggcaggaggattgcttgaggccaggagtttgagaccagcctaagcaatgtagcaagactctgtctctacaaaaaaatttaaaaattagctgggtgtggtaatgtgtgcttgtaatcccagctactcgggaggctgaggcgggaagatcacttgagcccaggagttcaagactgcagtgagcagtgatggtgccactgcactccagcctgggtgacagagcaagaccctgtctctaaaaataataataataatagtacttgcctcaaaaatgtattgaagattagatgacttaatatttataatacacttggagtagtgcttggtatatggtaagctccatgtaagtgtttgttaaatgaatacaaacttaaaactgcaactgtaaaaagcaaagtatgtcatattctgagagtctataataaaaggattcaacctagccagggaaatcaggaagggcttgagctgaaatgcaaaggagggggtacattaattaagggaaacactaaagtagagtagtcttagcagagaaaccagcacatgcaaaagctctgtggcaggaggaagcattttaaggacaaggcactggaaaaaaaggccaatgtggctggaacgtggtgcaagctaaggatgaggaagttggtagggctagtccatatagggccttgtaggccatagtcaagagtttggactataaaaattactcgtgagctttagaatcttctctcagctagctttagttgagatagatttattgcaaaggtggcccaaattttttccttccctgtacccacatcccttccaatgagactttacagctcctcccatcaagaggtgaagtctattttcccatcccttgaatctgggctggcctggtgacttgctttgcctgatagaatgtgctggaaatgacaccgtgccagttccgagcgtgggcctcgagcagctgggcatgattctgctgcttttcctggaaccctgctcagtcaccattagcacaagtttggcctagcctgctggagggtgagagaccacgcagagcataaatgagtcatcccagtcaaggctgtgctagatcagccaaaaatcagtaacacatgagggatccccagctgagagttagtaaaactgttcagccaagcccagcaatgatcagcagaaccacccagctgacccacagaattatgagttacatacacagccattgtttttaaccacaaagttttagaatggtttgttacacagcagtagctaactgatacacacattgaggggtcaggagcatggtaagaaatgaggggggtggggacaaagaaaggaagaagaattaggaggaggaggagaaggagggagaaagagactatagcaaggtgtaatgctgacacatccaagatgtgcacagagctctgggagcacctaggaggaagaacttagttctgcagggaagaacgaagagccacagtcaggagaggctttccagacgacaaaaaatgagcacatgtctgtccagggaggacaggcgagagaagaaagaacatgggcaaaggcatggagtcatgaaaagagaggaggcttggtcaagagcagggaaaatggttggggcagccatgggccctgggcacgtgagcatcagccttctataggccatgctaggggcagagctaaaggtgtagcaccagctaaggagcacccagctaggaggaggctggaaggacctgatatgaacacttgctgtggttgcagaagatggggtgagggatttggacagagagttccaggatagatacaaccacagcaaggggggaccaggaagcagggatcctcaagacccacatagctcttggaagtggtgtaggtcacaagggcatctaggaccccacaagccaagatcatttcacgactgtgtggccttaggcaggtctgtcctctctgagcctggcctctcggaggttctaccgaggaactcataaatgaaggctgggaaggcactttgtaaaccaaaccgtgaagcccatgcaattggatggggtggagttactcgcattcctcattcggtgtatttcctccggttttatccaaaaacggaagttttcccagaaaaccatgcatcagtcagaatcccaaaggaaacaggtagtaattgaggagggtttaattttttttttaagtgagcaaaacaccaggatggtgccacactccatgaacagcaacagtggggaacccttaccacaccaaggcctgcagggacaaggaggagagcagttagtgggggctagggagagaaggggctgccaacagcagctgcagcttcagccaccaacctggtggggagggagctggagaaataaatgtcccaaacctcactgtcctcccaccctccagtctccggctagaacctcccattggttgaacccattccagaagttggaagcttgtaatacactcataagtcagaccccagggccagagcagggggaggaggtgggcagaggacctgggtgagcacagaaagacatcagcactacctccatagagggtgtgtgggaggagaagaaaataggctctttaagacctagcaagacataggccagggacaggattcagcgtctccagaagaccacctctgtgtccaggcccttctccaggctgtctccatttcagtggttctcacattggagtctggggaccctggaggcccctggaaccctttcagggggtccacaaggtcaaaactgttttcataataatgctaagatattatttgccttttgactctcattcttccatggatatatggaggagttttccagaggctacttgatatagccacaattacctgaaaagactattaaaatccttccttctttttctaactgcatattggaatgagaccggattttcttcatacccttgaaccaaaacaacttatcagaacttatcagattgaatgcaaaagtaaatatgaggccaggtgtggtggctcttgccagtaatcccagcacttcgggaggccgagcgcggcagattgcgtgagttcaggagttggagatcggcctgggcaacgtggtgaaaccccatctctactaaaaatacaaaaaaaatagccaggcttggtggtgcatgcctgtagtcccagctacttgggaggctgaggcatgagaatcacttgaacccaggaggcagaggttgcagtgagccaagatcaagccactgcactccagcctgggcaacagagtgacactgtctcaaaaaaaaaaaaaaaaaaaaaaagtagatatgagactctaaagatttgcaaaaaatagagtacaatgacactcttctcacattcttcttactttagaaaatagttatttttcaataaaaatgttatttatgttgatatgtattgggcttatgattgtttaagtcagtaagtaaattttttttaatttctaatataataaatattgatagagctcacatagagaaaaagttcatggtggggggggtctttgacaatttttaggcacataatagggtcctgaaaccaagaagtttgacaccacaatgctcagaaaaactctctaaggaagttcctggtgtcacgctcttgttcgggaagaggaagctgaggccaagagaggggatgacagctagccggggttacacagctggttggtggctcagctgggattcaaatctgggctgtctggcaccaaagcacgctcacactctccccattgcccctgcggcaagaagccacaggagcagtggatggtggaacagcacctggcttctgccacctcttctaagaagggaacttgacagggattgattgatctcaatgatcagctacaaatggtctctacacgtggccatgttaatcagctcctaccagccaggatctgaccagtttgaaaggtttatagcaacaatgtggtgctgatttatttctccttaataaaaaagtgatcaagtgaaacctgcatctatcattctatttatcactcgggatgatttattgactaattacacttgcagtggccgctggctctaagtatggacgatggggggaggtggggtcagtccggccatcagtgctgccctggacacgtctgccgccttccgttccagccttgccattcacatgtaggcaagaacatgctctcgaatatggatgttcagactctgaaggaagcgggagagaagggagaaaggggtaggtgagaaatggagagattgtctggtcccagccatttgccccttcctgcccctttatccatggagaagacacggtgcagagagcagcaggcagggtcgccaggtaaacacggttgctcagttactttcaaatctcagataaacaatgaacaattttttagggtaagaatgtcccaaatattgcatagatgtcatgtaaaacctggcaaccctggccccagggccatgagggacctggtagagtattgagctgatgtcactatgagaagttccagtgtccataaccatagcccagtctcactctgcacgctgctctccccctgctcaacccatgggcgtcccactaggggctctgggaagatgtgacttctcggagctggtgggcaaatcacacagccttgctgagccttatctgcaaaacagaggctcccagcctgtcccagttcttccccttcatgctgcacagggctgatggggatggacaagtctgtcccttgccagctacatggtggagggcctatggcaagggctgccattggggctggcaagactgggcccccatccaccctaggaaggttgagtttcctttagtcctcttgaagacatagtaactataactcaaaacttttgtttgtatcattttccttgaaaccttggctttgagctaggaaaggacagagggtcagctggcacagcctttgtggaaaagcgcagtgtatctatcaaagttaaaaataagtggatgttgtggcctgtaatcccagcactttgggaggctgaggcgggcggaccacctgaggtcaggagtttgagaccagcctgaccaacatggcgaaaacccgtctctaccaaaaatacaaaaaaattagccaggcgtcttggcgcgcgcctataatcccagctactcgggaggctgaggcaggataatcgcttgaacctgggaggcagaggttacagtgagccaagattgtgccactgcgctccagcctgggcaacagaacaggactccatctcaaaataataacaataataaataagtgcctgttgtatttaaaatagaagcactatatgaggacttagtaaatcaatcaaccaataactacccctttgacatagcaatcccactcccaagcatccaaaccagggaataacaaggatgtttctattaataccgccaagtcacaaacaacctgaaatcaatctaaaggggatgagatggatggactgtgatgtagtcaaaagaagacacagaagtcatcagaatgagagaaagatattgcctaacctgcaaagatttccaagatatattattattattaatcattattattattagaaaaaagcaagttgagaacgttccagaccaggattcctcaaccttggcactactgacattttgggccggatcattcttcgtgttgggggctgtccggggcaaggcaggctgtttagcaacactcctttagcactctacacaccagatgccaggagcacctccctccccagccatgatgatcaaaaatgtcttcagatggtgtcaaatgtctcctggggagtaaaattccctccccatcccgctttcccaccccccacagtgagaactggtctagacagcattgtcaggaatgtttacatgaaccaaagtaaacacctaactagaacttctataggaacttaggtaaatgtatgaatgcatagcagaaagtctgaagggagtctccaaactgggagctggggttgtctctgaggagggaattgggaatttgggtgggggggaagagagggatctggggagacctttgcttttgttgtatgatctgcatgtttgaccatgagaatgcatgcatctgttcagtacttttttgttctttgtttgttttctttgagaaggagtctcactctgtcgctcaggctggagtgcagtggcgccatctcggttcactacaacctccacctcccgggttcaaggaattctcctgcctcagcctcccaagtagctgagactacaggtgcccaccaccacgcccagctaatttttgtatttctagtagagatgaggtttcgccatgttggccaggctggtctcaaactcccgatctcaggtgacccaccagcctcagcctcccaaagtgctgggattacaggcctgtgccactgcacccagccatctgttcagtactttcattataagagagaaaggaggagagggaagggaaagggagggaaggggaggggaagggaatcaatgggaaaggagggtcaagaaggagaaggagagaaggaaggaagggagggaggaagagaggaaggaaggaaggaaagaaggagggaaggaaggaaggaaagaaggagggaaggaaggaaggaggagggaaggaaggaaggaaggaaagaaggaaggaaggaaggaaagagggaagaaaggaaggaaggaaagaaagaagggaggaagggagggagggagggagggaatgagtggcagaagccaagtctgcagttgggaaatcatgggacgtgctggcttttcctctctgatcctcagtgtcctcaaagagaaaggcacagcataaacaggtctctaaagacccctcctgccccgtccactgttgaagagagccccaaggtgacctggccccctccctcccggctgtccctcccacacaacccagttgttgcacaaagaaaagaagtgcttggggcttctcctccctctcagcatctctgattatgcctccctgcaggaggaggggaggttggggcctggtcagcagcccagctccacaccgaggacttgaggactcgctggagcttgattaaataattacacagaatctactgagtaatcatgcccgtctcaagaagcaaggagcaccttcagagggaggtcccattagtgatttgggggcgtgtgagtgtatttgtctactgcctatgataaaattatcatcagaaggcctcatttacaaaatgcatccctttcccccatctccttccatcacctcccaaacccagagatgtgtataatgtaatccccattccacggcagaggacagggactcacgagctttggggctggctcaaggtcccagcagcaggggctggtggcaaaggtggtcaaataccagaaagtgcacacagagtggggacaaggctcaggactgaaacattttagaagaggttttgtttgttttttattgttttgttttgttttctcgctaggattatttctctcctttcagtttttgaaaacaaatctaaaatcagccatgggagcctccctaggtcttgctgccaagaaaacagccgagcatggagggtgagggctgggactcactgcggccgccctcatttccgatttacccaggccaaaggggactgccaggtggagagggggagcccaggccatcctggggctctgttctcaggcctaggggccaggatcttctgtaagccacccaccccccagctccaggataaggacaccccttccagccaagcgcctggtttaattgggaacggaaataaacggcttacaagaggctacaccagggctctctgtggcccacagggcctggtcctgagattcctgctgcctgcatggcttggccagctacccacgccaggccccgttgactcatttacactggagcagtccaaattcatcaataatgatttgtctctcttcaagaagaggctcgcaatcaaaaggccattaaaattaagtactggaggagcgggggccagggaagggggagggggaagaaaagggggaggggtggggccaggcggagctgagtgtgaatctccactggatgtggacactttcttgttgcgggaccttggatgggtcacgtctcgtcctggtttcctcttctctgaaacagaagggcagatatggctacagtatcagtgacactgtgtatggaaacacccagcaggaagaagcacgaagtgaccctgctatgaggcttccagcattgggacacatggggaaggtgatggatactgagcaggggtaatgccagcctgctaggtcagatcccagggcagctacccctcactgcccagctgtcctaactccagcccctgagtaactacccattgccacctcaactgggctcaacaccccagggcagggccacagctcggccctgctctaatctctgggcaggagcagcagaagcatcaggacacccaggacagccctagaccttggaagaggctggaccagacagggctccccagccctcagcagcctctcagccctcagccttccccctgccatctggagcatggcatctcaggatgcctcaggcacagagaggcgaccccagtgtcccacacccaccaactgaccctcctactgccctgggtgttaagaggccaacgtgcagccttcttttgggcacccagacagctaacatggagtcctatgcatgggtggctgagaaatgcaccactgtccccaccctgcctttctcaagaaataaaacacaaacaagaacaaagaaagaaagcaaaaggaaaaaaaaatggaattctgcagcccatcccacaaggtccaggccttccttgggagaaggggaggtgccaagaactccagatgtgttgatccctgggtttgcacagccatctgattcttcttgaggacaggaaatgaaattttacaaaggtgcccattatgtgccaagcgcttgttacttcatagaacaaccacaaggataccacaaggttggtattagtcattcttgtttttaagggagaactcagaaagatgaaaagccttgcccaaaatcacgagtctcagaccctcacggtgccaaagccaagattcaagcccaggaacagcagatcctgactcgattcttcctccacgcttccacatggccacccgagcacctgactctaggtccagttccagtgtgggctggaaggagcctctccatgctgatgccaatcacaatcatggccactacttcccatgcgcccctgggtgccaggctgcagctccaaaggttggagtcactccatcctccccaaaacttaacgaggccaggattctcattcccatttcacaatgaagacgctgaggcacagcgatgttaaatgacctgtccaaggtcacaggataaagtcatggcagagccaggtctccacctgatgggctgaaaaccgcacaagggccagggtagtgcccagctttgctcccacctgggccccacagagtgacagctcagcaagtgtgtgctggatggggagactggtagagggagggaaggaaggatggacaggtcagcacagccgtggaagagaatggctaagaggtgacactcagagccaaactgccagggctcaaacctcagctttgccactttttacctgcaagtttcttaatttgtccctacgtcaattttcttatctgaaaaatgcagataataatagttcttactagctagggttcttaagagaaacaagtgagttcatatggagcctgggacatggtgggtgccctacactattgtggattagtggaggacaggcaggtctaaagccgtggactggcggcagcccaaccacaaggtgtcctcatgaggcctccagtgaggtcagccccacccttgcacactgagagtgagcgcctcctgagcacctcgctggcctcacctaaatcccttccaaccctggtcagcccatgactttccatctgggcttccccagtcccgcagggtccagttgccccaacccagaggacagagacgctcagaccagccccgaaagcgtctccagcctggtaacagtgagcaccccatctctgagaggttaaagcagagtgggacggccacctggggacctgcagacaggcttctggctgggaaggagactggaagccactttgaagctttgtgccggctgagcattaccggcgcgaatggccacagcgccacctggtggaaatataagaaatgacctaaggggccccagagggtggaacacaagcagcatcctctccgagtgggacaggccccagcccaggtgcttctcacaacaggggtacttggacattcaacaaataaatgaggccccaataccaagcactttggtgcgttgttttcacgcgctataccatttaattctaacaacactctaaggaaggcatccttaccctttttacaaataaagacattgagctcggagatgcaacgtttatttgaccaaggtcacacagctagcagtggcagagtcaggatttgagctctcgaattctgactccacagcctgccctcctaattgctaagccttgggggattccatgagaaagaaaaccagcacccctcccctgtcccaccccttcgtttcatggagcttacacctagtcaggggaacagacagaaatcagaaattcactgactaggtaccgtgtgtcaggcactgggctaagttctagcaataccgtggtgaagagggtggtcagggtccctgctcaaatgaatcctgtggggaagaaggacattaaccaaataatcacacaaatatgcgactataacgggagacgtaaaggaaagatttgggttctgagacccactgaccaggcacctactgcgctgaagcagtaacatactgagctgagagctgaaaggtgaccaggacttacccaggaaaagacgcacttattcattctttgacaaatgaaagcactgtgtgttccccatggtgttttcctcttttgttacaataaataaatagactgtatatacgctattgcaacttgcatgtataaataatagactgtatatatgctattgcaacttgctttctaagtctacatagttttttggttctttgcatggcaatacacagagatcatttgttttaactaaggaggctgtcacacaactgacatctgccttatgcaccacgatgtatttatctgtgcccctgctgatgacacttgagttgtttccaaattttaactcctacaaactgctacagccacatcctccaagtccatagtctctcaaagtgcatgcatatgagttcccctgtggtaagtgcccatgttccctttaatacttgtcaacatcattttgctggagaagagaagaaaaaaaaattttttttttttttttgagatggagtctcactctgtcacccaggctggaatacaggggcgtgatctcggctcactgcaacctccacctcccgggttctggcgaatctcctgcctcagcctcctgagtagctgggattacaggcacacgccaccatgcccagctaatttttgtatttttggtagagatgggatttcaccctattggccaggctggtctcaaactcctgacctcaagtgatctgcccacctcaacctcccaaagtgctaggattacaggcacgagccagtgcacctggccaaaaataattttctattactaataagtttatacaaaaacaaattcattcactagttcatttaccccagctgaagccaagttaaggatctaaaacacatttgccaaaatgcttcccacttttctataggccttattctttcttcggttttcttttataatttttctaagacactacttcttaagagatacatgtaaagggttctaaatttcatttcttaaaaaaatcacctgtctcataaacattttgcattcctaatttcaggatttcagctgaccactccatggccttcaggctggctcatctgagggttagtggcacctccatagttacaccatataacttgcagacacataccttcttacagataggtgaggactgggaggaatggcctacatttctttttttttttttcaacttttattttaagttcggggtacatatgcaggatgtgcaggcctgttacgtaggtaaacgagtgccatggtggtttgttgcacagatcatcccatcacctaggattaagcccagtatccattagctattcctcctgatgctctccctccccccaccccatcgcataggccctagtgtgtgttgtttccccccaaggtgtccatgtgttctcatcattcagcttccatgtataagtgagaacatgcggtgtttggctttctgttcctgtgttagtttgctgaggataatggcctccagcttcatccatgtccctgcaaaggacgtgatctcgttcctttttatggctgcatagtattccttggtgtatatgtacctcatgtctttgctgttgtgaagagtgctgcaatgaacatacgtgtgcatggtctctttataatagaatgatttctattcctttgggtatatacccagtaatgggatggctgggccaaatggtatttctgcctctaggtctttgaggaattgccacgctgtcttccacaatggttgaactaatttacattcccactaacagtgtaaaagcattcctttttctctgcaatctcgccagcatctgttgtttttttactttttaataatagccagaatgatttaagtcgatatccaagggtggaccagttcccatgtttcccagcctgtgaggagtctcctgtgaaaatctgagctagccagcactatatttcccatcgatgcccatcatgtgttatggcccctgacctgggctgcaggtgcccgagtaaactgaaggtttccagggtgtcaggtctagaggagacatcgtcagcactgaccttgaggcctgtgaagcccatggtggtctctttggaggaggatgagggttagggcagggtggctgcccagttcccaataacagccctttttctggaattgcccttgattctcagaactatggtgaacctggccagtgctaggatagtgaaaggcaaaagggactctatggcccaaacttgccaccatctctaccaaatttattctctgggccctctctattgtccactttgtcaggagctgagatgagctgagctaaacagggtggaactgaaagtcgagaccccaagagaggaggcatctgatccaacagcagttccgaaatctgccaccaggtaacagcagagctcctgctctgtctctggtctctcactggcatggggtcccctgggactctgatctgcacccaggcttggccttgagggtcctctgcttgtctcaactctgcaattcattgtgagcctccagtccccatcaaaaagcaccactagcaggataagattctgtggtctgttggggcacagggactgtcttgtgccccctggaagtctgtttccaaaggatcctgttcatttcacaggaggcctagggcagggctaccaggcagctctggaaaacccaggagacaacacagggcagctcaggttgccactagagagaggattctagagcccaataaagtgtccctgctgctgtcccctcatctgtggccacaaggccttgaaccccgactcagattcactccctgcagccacaggcctgagcccagcccagcctggtaagccgtattctgaaattgttaaagaaaaagatgaaggcctgagggctcgcagtctggggccatgtgccaagccctgccttctcccgtgcccatcattccaagcagctctgacctcactgaactcaaacaaggactccacaccccaacacccaatgtaccagcacaggagtctccctgtaaggccccagatttctggatgagcatagacccatctgatggcccctaggaggctgtttgtggcctgagttctggtttggcaccctatccatgatcagggcggaccagcctaggtgggaaaatgagacctggagaggttggagaccctgcccaaagcctggggcctgaaacctgaggtctggcaggttcctggctccacactctcacagctccctgtgacaatcccttcattgcgcacatcacaattataattccgtgatgcatatgcttgcatggccttttaatgtcctgctacccgcgtgacctgtaagccccatgaaagaagggactatgttcactcctgtaaccccttgcaactagtgcaatgcctggcacacagtagatgctcagaaaataactggaataagtaaaataataaagggacatcctcctaaaggagaccttaagacatttataaaatgttttacaatttacaaagcaccccccacagttttccagtttcattctccccaccaccccgtgaaataggtactattaggctgggtgcagtggctcacacctgtaatcccagaactttgggaggctgagtgggtggatcacctgaggtcaggagttcgagaccagcctggccaacatggtgaaaccccgtctctactaaaaatacaaaaattagccagccatggtggtggaagcctgtaatcccagctactctggaggctgaggctggagaatcgcttgaacccgggaggtggaggttgcagtgagccaagatcgtgccatttcactctagcctgggcaacaagagcgagactctgtctcaggaaaaaaaaaaaaagagagagagagagagaaataggtactattattgcccacataatgcagtgtactcatttcctatctctgcaacaacgaattaacacacacagtggctaaaacaacacaagtttattttctgactggaggtcagatgtccaacccaggccctatgggctaaaatcaaggtgtcagcagggctgtgttccttctgggagctctcaggaaaatctatctccttcctttctccagcttccagagaccacccatgtttcttggctcatagtcacttcctctagcgtcgaagccagcaatgtcacatctctcttactgaagccagaagaggttctctgtatttaaggatgcctgtgattaggttaggcctacctgcataatccgggataatcatacattccagacattaggatacacacatctttttttttttttttttttttttttttttggtggtggtgagcggggagagatgttatcctgcctaacacacagagattcacagagattcataaacggagaggtgaattaaccagcccacctcgcccagcttgtgactgaagtgagatttaaagccaacattttggggctacagaatctgagctctttctccccttttccagagccagaagggaaggacacaggggcccagtctccatacagtaaatacacattttattttattttattttatttcattttttgagacagggtcgcactctgacccccaggctagagtgcagtggtacaatcacagctcactgcggcctcaacctctgtggctcaagtaatcctctcacctcagcctcctgagtagctgagactacaggaacacaccaccacacctggctaatttttttttatttttttgtagagacagggtctcactttgttgccaacactggtcttgaattcctgggctcaagcactcctcctgccttagcctctcaaagtgctgggatcacaggtgtgagccactgtgccagcccacacttttatttatgattaaagagaaagaaaaaaaaaaagatgcgcttgtctggagggtgaggccgtgtgggaaaactttttatttgcttgcctttattatcattactttaacggtgtatttaataaatacaacgttttcagctagagggaaaaaggaattaacccaagtcattggttgagtatgaaggcatggagcccccacggccctcctcgctgcaattaagcaaatggccagcagatggcggggcatgctcacagcagggccttgctctccggaccatctcttttacgggccgccgagcaaaggtctttcttttctcttcttcaaaacccactctacaaggaaatcttcagaaacattccagcaggcaagacaagggcataaaggccagggggtcccccagcctcaggacagcaagtgtggggacgtgccctactgcatgccccatcccctgagccaggaacaaagaccagaggtcaagccggcagcagttgaggaagagggtcaggcgtggctgtgtgtcccgaattggtgggttcttggtctcactgacttcaagaatgaagccgcggacccttgcggtgagtgttacagttcttaaaggcggcgtgtccggagtttgttccttctgatgttcggatgtgtttggagtttcttccttctggtgggttcgtggtctcgctggctcaggaaagaagctgcagaccttcgcggtgagtgttacagctcttaaggcggcacgtctggagttgttcgttcctctcggtgggttcgtggtctcactggcttcaggagtgaagctgcagacctttgcggtgagtgttacagctcataaaggcagtgtggacccaaagagtgagcagcagcaagatttattgcaaagagtgaaaaaacaaagcttccacagtgtggaaggggacctgagtgggttgccactgctggctcaggcagcctgcttttagctgcagggcagcggaaggcaggatcagctgggttacaggacacttaggatgaccggacactttacacgcttttacacacatttatcattacatctcctcttccttgtggcccagtatggcacctggcatcaaaaatactgaactggctgggaagatggttggtagcaatgccagcgcagtttttgaacccctccaaatttctacataaaaataagcaggtcaggtcaggcgcaatggctcacacctgtgatcccagcactttgggaggccgaggcaggcagatcacctgaggttaggagtttgagaccagcctcgccaacatggcgaaactccatctctactaaaaatacaaaaattaactgggaatggtgatgcacgcctgtaatcccagctacttggggggctgaggcaggagaatcccttgaacccgggaggtggaggttgcagtgagctgagatcgcaccactgcactccagcctgggcaacagagtgagactctgtctcaaaaataaaaaataaaaataagcaggtcagattagcaaaagcaaaacctacagacaatgttcgcttaaaattagatgataaggtatccccatgaacaccaaaacacaagcggggaagcacagccctcccatagccacctacatgtcatcaggtccccctacgttcccccagggaggcttccttggtttagattctggcccttggtgccccatccagcagccaacagagggaaacaaggagccctctgatggacttaagaacaggagaatcccaaaagagccagcaggtattcacgaggaagcaaggagggacaactggagacagcagcagaagctgggagggtctcgcccagtccgggagcaggtgagagtcagcaaggactaagggactgcagcggtagagccttgagaaccctcaacactgacccacttggcttcccttccaggacaggatcacatagcactgagcatggaatcaaaatggagcaggatctggacaatcaaaaggaaggaaggagaaggccaggcgtggtggctcatgcctgtaatctcaacactttgagaggccgaggcaggcagatcacttgaggtcaggagttcaagaccagcgtggccaatgtggtgaaaccctgtctgtattaaaaaaaacaaaaattagccaggtgtggtgacaggtgcctgtaatcccagatacttgggaggctaaggcaagagaatcgcttgaaccagggaggcagaggttgcagtgggctgagattttgccattgcattccaacctgggtgacagaacgagtctctgacttaaaaaaaaaaaaaaaaggagaaaattcagatagaagcagagggaggaaattaagtcaaggaacctcaggaagcaagccatcacatttttgcacatgaaaaccacaggagagggtactcttgaagttggaaacgccattctgatcatctctttcttcaagtttgggaacactaattccacataaaaactaacaatggaaaagtcttgaggccaaatcccatgcaaagttaatttaagcaaaaggagaatagggagcaaaatgacattcccacaaacagaaaaggcatgccagcaggacatatctcggaagagatcaaaactgtaaccttctattttaaaatgacctaaaatttcaattatgcacaatgtgaaagaacaacataactgagaattagaaactcatataaataaggtgacacaaatcagaaaagaattaaaaacttaagaaaaaaaatttcaggaatgaagactagaaggaacataagagcaaactgatgcaactttaagataatgccttaaaagaaaaaggtgaaaaggaagaaatattttaaatcagtaggaaatgaacgctattttctaaaatcgtctagagaaagtggcaaatattgaaattaggcaaagaagttccaacgtatcaataataagagttcttgaagaagaaaaccaaagcaagaggacaagtaataaaaacaaaatcaagagaacttactgaaatttttaaaaattgaagttacatattgaaagcacatactgcatacctgaaaatatcaactcagaataatcagacatattcaaataaaattacagactttgagaaaagtggggtggtgaggggagaatccttcagcatctatgtaaataattgacttataaggaaaaatcaattattatcagacttctcaagagcaatgctttataccaaaagaaagatgttacatgtttaagatgttcaaaaacaaagaatatgttaataattttatgtccagcaaaactgacttgaaagtataatgggcagaggcaaattgttattagcatgaaatagaggatattgttctcatgggctcttcctgtaaacgtcttagatcaaaagcttcagacaagcaaaatgactaggaagacaaaaaatgaaatttaaaaaactggtaatgaacgttaaacatatagttacttatgcaactaagactaaatgagaattgtaaaggagaaaatatagcaggtaatggctatacaccctgacaatgtagctacaagaccactttttttatttttaatttttgtgggtacatagtggtttggttttgttttgttttgtttttgtttttgtttttgtttttgtttttgttttgagacagagtttcactctgttgcccaggcggttgtgcagtggcgcaatctcagctcgctgcaacctctgcctcctgggcttaagggatcctcctgccaaagctcccaagctgggaccacaggtgcacaccaccatgcccagcttattttttaaggtttttttgtgtagagacaaggtctcactatattgcaggctggtctcgaactcctgggctcacgtaatgctcctgccttggcctctcaaagtgctgggattacaggcgtgagccactgcaccgggccataagtgtatatattaatatttgtggcttacagagatattttgatagaggcacacaatgtgtaatcgtcagatcagggtaaatggagtatccatcacctcaagcgtttatcctttgtgttacaaacaatccaattactcttttagttatttttaaatgtacaactattttttatgatagtcaccctgttgtgctagcaaatagtaggtcttattcattcttcctaattttttgtacccattaaccatccttctactctgtgtctccatgaattcaatcatcttaatgtttagctcctacaaataagcaaaaacatgcagtcttttttttttttttttttttttttttttttgcagcagagtctctcactgtgttgccaggctggagtacaatggcataatcttggctcactgcaacctccgcctcccaggcttcagcggttctcctgcctcagcctccagagtagctgggattacaggcacgcgctcctgaacccaactagtttttttttatttttagtagagatggggtttcaccatgttgcccaggctggtcttgaactcttaacctcaaatgatccaaatgatccactttggaagcctcggccttccaaagtgctgggattacaggcatgagccaccgcacctagcccgaagtttgtctttctgtgcctagcttatttcacttaacataatgacttccagttccaaccatgttgttgcaaatgacaggataccattctttttatgactgaatagtattccattgtgtatatgcaccacattttctttatccactcatctgttgatggattgcttccaaatcttgactattgtgaatagtgctgcagtaaacatgagagtgcaaatatctctttgatatactgatttcctttgttttgggtatatacccagcagtgggattgctggattgtacggtagctctatttttagttttttgaggaacctccaacttgttctccatagtggttgtactaattaacattcccaccagcagtgtacaagagttcccttttctccacatcctcaccagcatttgttattccctgtctttgggataaaagccattttaactggggtgacatgataactcattgtagttttgattggcatttctctaatgatcaatgactttgagcaccttttcatatacctgtgtgctatttatatgtcttcatttgggaaatgtctattcagatattttgcccatttttaatagaattattaggttttttcctatagagttatttgagctccttatatattctgttattagtcccttgtcagatgggtagtttgccaatattttctcccattctatgggaggttttttgagggttttttttatcatgaaggctgttgaattttatcaaatggtttttcagcatcaattgaaatgatcttatgatttttgtccttcattctgtgattctatgattctatgggttgtctatgattctatgggattctatgattctgtgattctgtgggtttctcttcacttgttgattgtttcctttgctgtgtagaagttttttttaacttggtgtgatcccatttgtccatttttgctttagttgcctgtgcttgtgggttattattactcaagaaatcctttacctctccaatgtcctggagggtttcctcagtgttttctttttgtggtttcatagtttgaggtcttacatttaagtctttaatcaatttggatttgatttttctatgtggtgaaagataggagtctagtatcattctcctgcatgtggatatccacttttcccagcaccatttattgaagagaatgtcctttccccaatgtatgttattggtacctttgccaaaaatgagttcaccctagatatatggattcattcgggagttctctattctgctctactagtgcatgtgtctgtttttatgccagtactatgctgttttggttcctatagctatgtaatataatttgaaggcaggtaatgtgattcttccagttttgttcttttcgctcaggatcgctttggctattctgggtcttttgtggttccatataaattttaggattgtttattctatttctgtgaagaatgtcattggtgttttgatagggattgcattgaatctgtagattcctttgggtagtaaggacattttaacaatattgattcttctaatccatgaatatgaaatatctttccatttccttgtgtcctcttcagtttctttcaccactgttttatcattttaattgtagagatctttcacctctttggttaagttaattcccaggtattttattttattcgtggcaattgtaaatgggattaatttcttgaattctttttcaggttgttcgctgttggcaaatagaaatggtactgactttggtatgttgtttttgtatcctgcagccttattgaatttgtttatcagttctaataattttttggtggagtcattggattttttcaaatataaagattatataatctgaaaacaaagataatctgaattctttctttccaatttcgatgccctttatttctttctcctgtctgattgttctagataggatttccagtactatgttgaataacagtgatgaaagtggccatccttgtagtgcttcagatcctagaggaaaagctttcagtttttccccattcagtatggtactagctatgggtctgttgtatatgggttttattatgttgaggtatgtccttctatacccaggttttttgagggtttttatcatgaagggctgttgaattttatcaaatgctttttcagcatcaattgaaatgatcttatgatttttgtccttcattctgtgacatgatgtaccacattgatttatttgcatatgttcaaccatctttgcatcactgggataaatcctacttagtcataaggaatgatctttttaatgtgttgttcaattttggttgctagtattttgttgaggatttttgcattaaaattcatcagggatattggcctgtagtttttgttttttgttgttgttgtttgtttgtttgttttgatgtgtctttgtctggttttgctatcagggtaattctggccacatagaataagtttggaagtattcctccctcctctattttttggaagagtttgagtaggattggtattagttcttctttaaatgttttgtagaatttagcagtgaagccatctggtcccaggattttctgtgctgggagactttttactacagcttctatttcattactcattacttgtccattcaggttttgttttttgttttttgtttttgtttttgttttgagacagagtctcgctctgtcacccaggctggagtacagtggcatgatctcagctcactgcaagctccccctcccaggttcacgccattctccttcctcagcctcctgagtagctgggactacaggtgcccgccaccacacccagcaaattttttgcatttttagtagagatggggtttcaccgtgttagccaggatggtctcaatctcctgacctcatgatccgcccaccttggcctcccaaaatgctgggattacaggcatgagccaccgtgcctggccaggttttggatcctcatgattcaatcttggtaggttgtatgtatctagaaatttatccatttcttctagattttctaacttattagcatatatttgctcatactagccattaattatcctttgaatttctgcagtatcagttgtagtatttcctttctcatctctgattttatttctttgtcttctctcttttattcttcaattgtctgtctaaaggtttgtcaattttgtttatctttcaaaaaaactttgttttgttgatcttttgtattgttttttgtttgtttcaatttcatttatttctgttctgattgttaatatttcctttcttctactaattttgggtttggtttgcttttgcttttccagttctttaagatgtatcattaaattgtttatttgaaatttttcttcttttttgatgtaggtgcttgtaactataaatttccctcttggtactgctttcactgtatcccatagattttggtatgttatgtttccattatcatttgtttcaagaaattttctgatttcctctttaatttcatcattgacccactggttattcacgagaatattgttaatttccatgtgtttgtatagtttccaaaattcctcttgttattgatttctagttttattccattgtggtcaaaaagatacttgatatatttttcaaatttttttaatgttttaagatttgttttgtgatctaacatatggtatatcattgagaatgatccatgtgctgaggaaaagaatgcatattctgcagctactggatgaaatgttctgtaaatatctattaagtccatttggtctactgtacagattaagttcaatgtttctttgttgatttttctgtctggaagatctgtccagtgctaaaagtgggatgtggaagtctccagctgttattgtattggagtctatctctctctttaggtctaatagtatttggtttatatatctgagtgctccaatgttgggtgcatgtatatttacaattgttatatcctcttactgcattaactcatttatcattatatagtgaccttatttgtctcttcttatagtttttgtcctgaagtctattttgtgtgatataagtatagtgactcctgctctttttttggtttaagaggcatggaatattattttccatccctttattttcagtctgtgtgtgaagtatgtttcttgtaggcaacagatcattgggtcttatttttttaattcattcagccactctgtgtcttttgattagagaatttagtccatttatatttaatgttattgataagtaatggcttactcctgctattttgtcatttttgttctgtggtcttctcttccttctttccttttttttctgtcttcattttagtgaaggtgattttctctggtgatatgatttaatttcttgctttttattttttgtgtatgcattgtatgcttttgatttgaggttaccatgaggcttgcaaatactatcttatcacccatcattttaagctgatagcaatttcatagtgcttgcataaactaataagcaaaaagaaaactaataaagactctacactttaatttcatccccctgcttttaactttttgtttcgatttatgtcttactgtactgcctatgtcttgaaaagcttttgtagtcatcatttttactggttcatctcttagtctttctacttaagagcagtataacacactacagttacagtgttataacattctgtttttctgtgtacttactattaccagtgagtcttgtaccttcagatgatttcttattgctcattactgtcctttactttctgactgaagtattgcctttagcatttcttgtagaacaggcctggtgttgatgaaattcctcagcttttgtttgtctgggaaaatatttctctttcatgtttgaaggatattttcatctgatatagtattctagggtaaaaggcttatttttcttcagcactttaaatatgtcatggcatgctctccagtcctgtaaggtttctactgaaaagtctgtggccagacatattggaactccattgtatgttatttgtttcctttctcttgctgcttttagggtcctttatttatccttgacctttgggagtatgattattaagtggcttgaggtagtctttgggttaaatctgcttggtattctataaccttatcatacttagatattggtatctttttctaggtttgggaagttatctgttattatccttttgaataaactttctacacctatctcttatctacctcctctttaagctccgtaactcttagagttgcccttttgaggctattttctagatcttgtagatatgccttattcttttttattcttttttcttttgtctcctctgactgtgcattttcaaatagcctgtcttcaagctcactaattctttctctgcttgatcgattcaggtattaagagactctggtacattcttcagcatgtcaattgtatttttcaactctagactttctgcctgattctttttaattatttcaatctgtttgttaaatttgtctgatagaattatgaattccttctctggtttttcttacatttctttgagtttcctcaaaatagctattttgaattatctatctgaaagatcacatatctctgtctctccaggattggtccccacgggcttatttagtttgtttggtgatgccatgttttcccggatggtcttgatgcttgtggatgtttgtcagtgactgtgcatttaacagttaggtatctgttgtactcttcacagtctgggtttgtttgtacttgcctttcttgtggacaggtacaaacaagcccagactgtgaaggacaagtattgtggaaggacaaggctttccacgtattcaaagggacttgggtgttgtgatctaagtgtttggtcactgcaaatgcatctgcattaagggacaccccaagcccagtaatgctgtggttcttgcagagttgcagaggtaccactttggtagccttggataagatccagaagaattctctggattactagagattcttgttctcttcccttactttcttccaaacaaatggagactttctctctctctctctctctctgtgctgtgctgcctagagctgggggagaagtgacacaagcacacctgtggtcaccatcactgggactgcgctgggtcagacctgaagccagtgcagcattaggtcttgcccaaggcctgctgtaactgccacctggctactgcctatgtttgctcaaggccctagggttctacaatcaggaggtggcaaagccagccaggcttatgtccgtcccttcaaggcacccagttcccccaggccccaagcaggtgcagagatactgtctgggagccagagactggagtcaaaaagcttagaaatctacctgctgttctattctactgcagctgagctggcactcaaaccacgagacataatccttcccacacttccctcccacttccataagcagaggggcctcaacctgtggccatcaccacgacaggcccataggactactgccagtctaccaccaacgttcactgaagacccaagggctcttcagtcggcttgtagtgaatgttgccaggcctgggactcatccttcagggcagtgggtttccttcccacccagagcaggtccagaaatggcatctaaaaggcaaggcctgaaaccagggaccccaagaaccctctttatggtctagtctactgtggctgagctagtatctaaggtataagacaaagtcccctttactttttcctctgctttactcaagcaagtgttctcactatggttctcaccatagccaccacagctggaaatgtgctgggtctcacctgaagccaacatgtctcagagtctcaaccaaggcctatggtagataccagggtatcgctgctggttcttcaaggtcccaggactctttaatcagcaggtaatgaatcctgccaggactgagtccttcccttcaaagcagtaggctccctcctagcctagggtgtgtctagaaatatcatccaggagctaggccctggaatggggaccttatgaccctaactggtaccctatcctactgtggctgagctggcatccaagatgcaagacaaagtcctctttactcttccctctcctctcctcaagtggaaggagcttgcacagctgcaagctgtgctacctggagttggggggagggtggtgcaagtactcccttagctgcctcagctagtgtctcagtaggtcatgtgcccccaccatgtccactgactctgagcccagctcagcactaggacttgcctaggaactgcagtccttgtgaccttgactgccattcaagtttatttacaacccagagcattttacccccatggtggtaaggcttgctgaaactcaagttccatccactgggttgggcaattcccttgggcaattaccctctggctagggctggtctaaatactctctccatcatcagctgtcagctgagttcagttcggttttgctttcactgtgacaaagcagcatcaaattcaatgcaatgtctcacaatagctgcgctctccctcttccaagcacagagattctctctctacgccacaaagccactgccatgggatggggacaggtggcatcagcaactcaagactgtcttccctaccctcttcattgcctctttcaacagtatgaagttaaaatcaggtactgtgagtgctcatccaattgttggttcttatgatgaaggtgcttttttgtgtgtagatagttgttaaattttatgttcctgtgggggatggggagatggagccttctattcagccatcttgctccacctcctacaacggcagtccccaaccccctggccatggactggtactggtctgtggcctgttaggaaccacgctgcacagcaggaggtgagcagcagacaagcaagtgaagcttcatctgtatttacagccactacccatttctcattaccgcctgagctgcacctcccatcatatcagtggcagcattagattcttatgggagtgcgaaccttattgtgaaccgtgcatgcaagggatatagttgcgggctccttgtgagaatctaatgcctgatgatctatcactgtctcccatcatccccagatgggaccatctagttgcgggaaaacaagctagggctcccactgattctacattatgaagaattgtataattatttcattatctattacaatgtaataataatagaaataaagtgtataataagtgcaatgtgcttgaatcatcccaaaaccatcccttaccccaatctgtggaaaactgtcttccacaaaaccggtccttgatgccaaaaagcttggggaccactgccctacaagaccacttttaaaataggaataatgggaagaccatattcaaaaaaaaaaaaactttttaaactgtttccagtaattattttgttgatgctattactgctgtcattttgagaccattgcgtgtgtaatgtgggataaggaaaataagcaattacagactgttttaattctatcatctcctgtattattgaggatctgattctcaatatggaagaaaggagagatgtaatatagaaaagattaagtgaaaaacctaagtgtgaattggaattattagtatgaacacagggtgctatcctcctggtttctggctgaaaggtgtgtgtgtgataaaatatatttcctaatgaccaaatcagtagccatctgcatccctagcatccagacagtggtcatgaaaccctattttccatttaaaaataaaacggggcccggcacagtggctcacgcctgtaatcccaacactttaggaggccaaggtgggtggattgcttgagcccaggagttcaagaccagcctgggcaacatggagaaaccccttctctacagaaaatacaaaaattagctgggcatattggtgcatgcctgtagtcccagctactcaggaggctgaggtgggaagatcaactgagcccaggaggtcaaggctgcagtgagccgtaatggcaccactgcactccagcttgggtgacagagtgagacctcatctcaaaaaatatataaaaataaaaggacttgtagtcagttaatatttattcagtatttcaatcttgtaaatataaatatttacaagtaggtttcactgtcctctcctgatggatgacaaagggaaaacacagagaagaaagcagttttctcagggccacacagctgctaaactgcccagctgggcttgaaacccaagtgaggttcatctgttcattcaacaaatagttgctgacacctgctgagtttactgctagggaaacagctaagttaaaacagcctgacttcccatccacctgcccttcctgtgagaaaggggaagatggacatgcaagggacacttgctggtcttggtacccacttgggcacagccccagcacctgtcccctgtgcaaagccgatgtgctgctctcagaagtggtagctaagcccacgccctttcacccccagctctgaagatgacaatgcattcaaattcaccagatcacccccagctctgaagatgacaatgcattcaaattcaccagatcacccccagctctgaagatgacaatgcattcaaattcaccagatcacccccagctctgaagatgacaatgcattcaaattcaccagatcatctaatgaagtttcacttctgtttcttagcacctccctgactcttctgttccctagagtggaaggagggtctgggaaaggacctttgcctgaaactaagaagtcaacatgatacccctcaatatcccacctgggaagggagctgccaatgagccgaagcagatggggaggagatgaaactgggctatcagctttgcaggctggagccccctcctgtatctgccttatcttctggtatccccagcacttggcccttggccttgtagaaagcaggaatgtgatacatgtttggtgaatgaatgagtgaattaattaattaatttaatatattaatttgtatctatttcaaatagagtctgaagctcaattaatactttaaaaatacagctgggcatggtggctcacacctgtaatcccagcactttgggaggccaaggcgggagcatcgtccaagagtttaaggctagcttgggcaacatggtgaaaccccatctctaccaaaaatttaaaaaaaaaagaattagctaggcatggtggtatgcgcctgtagtcccagctactcaggagactgaggtgggggaatcacttgatcctgggagggtgagactgcagtgagctgagatcacggcactgccctccagcctgggtgacaaggtgtggccctgtctcaaaaataaataaaaataaaaatactatataatcattcattctaaaacagaagttataatcatgcctatccctagggccattgggaagattaaatccatgaataaatgtaaaacacttagaccagcgcctggcacataccaatcccgcaataagctattcatgtaaactgagagtaggttgtcccactccatgtgggattaggggtcagtgtaggaccagggtcagagatcaaggggagaatcacgcaaaaatttagtatgaagttaggattagaggaccagtttgtgtccacccagcagtcagattttttagttaccatctatttgtttatttatgtcccacattgttccaggaggagtcaaggcagctttcaggaattctaactacagaaatcaagaaagagaaagatcaaagttactatggactgaatgtttgtgtcctccccaaaattaatatgttgaagcctaatccctaatgggatggtattaagaggtgagacctttgagaggtgattacgtcatgaaggtggggctctcatgaatgggattagttcccttttaagaagaaacataaaaggaaaaaaagaaagaaagaaaaaaagaaaaaataataaaaagagaagaaacgtaagagagacctctctctctctctttcaatcaatcaatagctagatctccccctctctaccatgtgaggatacaacaagaacacagccctctgcaaagcaagaagagtgtccccaccagatactgaatcttccagcaccttgaacttggacatctcagcctccaaaaccatgataaataaaattctgttatttcagccaccgagtatgtggtattctgttatagcagcctgaactaagacgaaatggaggtgttactccccaagggtactcatgctggcaccctgaggccttctcagcacagagctgcaaatgggcaaccaaatctcaggccttgctggtcattctgaaggtcacactgacagcctatggtcaagcagagccagctgcacgaagtcctggtaagaattccatgagatcccccatgcaaagtgttggcacagagtaagttctcaacacatgttgctattgctatcagtgcacaggctgaggtgaatgcgcagcgagcagcagggaccagcattttatcactggccagagcagtgcattctctccccatgagcagccctggattcagagccagaaaaagtggatgttcaatggcatcagattgggggagccaaataaattccacggggccaccctgaccagcagctgtagagatactggaagtctgttggctacaaccctctctcctcggaatgtgcctggacaggctctggcagctctgggctctgaatgaccaaaccccagcccaccagacatgacttttccctatatagctggatatatttggctagatgaggacaagtccacaaggcatatttcaaatgtggagtgtgtgtgtgtgtgtgtgtgtgtatgtgttggggggttgtattcagttcccattgctgctgtaacaacttaaccacttaaacaatacatagtattttacagtcctgcaagtcagaacagggcgaaaaatcaaggtttccacagagccgcattcttcctggaggctctagggtaaaatgtgttccttgcctcttccagcttctaaaggccgcccacattccatagacttgtggcccttatccatcttcaagccagccattgaatcactctaacctttgattctactttttgttgttgttgttgttgttgttgagacaggatctcactctgtcacccaggctggagtgcagtggcgcaatcacggctcactgaagtcttggcttcccgggcccgtgtgatcctcccacctcagcctcccaagtagctggacttcaggcatgcaccaccacacccagctaactttttgtattttttgtacagacaggatctctctgttttgcccaggctggtctcaaactcctggactgaagcaacccacctgcctcagcctccaaagtgctgagattactggcatgagctaccatgccgagccttgacctctgactctatcatcacgtctctttctctgactttcatcctgccttcctcttataaggaccttgtgattacactgggcccagccagataatccaggatcatcttcccgtctcaagatcattagcttaatcatgtctgcaaagtcccttgggccatgttaaggttaaagtgtttgcaggttccgggagttttgatgcaaaatatctttgggggccaagcttctgcctgccccaggggcctagtgttataaactcttaagatgctgtgaatctcctgccctctgctctcccaagagagggactctggagccaaaaaaacatttctaagtccagaaagaattttggcaaaatgtcccatcagaagataaaggaaaggggtgaattatctctttgggtctttccagactgagcaagatattattcacctgtgttgcccatccggggtccagggtaaaagacagcagccagtatccagcttcacctgctgggagtaacccaggccacgaaagacttcttacctccttgctcacttgtgattcaaaaggccatttctttacctcctgagatggcccaaagaagcaatggcccagggaccattttggggagctgccttctagatctgcagaaagtataaaatggttccaagcaaagaaacactggacttcccggggttccagatccaccttccacatcagagccccaattcccactttaactgacttgctggcactgtgtctctctgtgtgccccagaagaaatttcttccaaatcttaataataggaataggcattttctctggggggaaactgttctgctttttacctgacaagctttatgaatcatgtgatggattacatttcccttttcacaatggctgctaggaagctcagagtcagatttgtggcccatggtttccaactacctaggagtctataaactgcattgcttgcactaacctctcccttgattgctcttagctttcttctcccatttcccctttgtccctgtttcttcatccccctattttttactttttactcttgaaattgttagtccttgagatgaaatagaaatgagggtgacaagattgcctttgagagttaaatgcagttaaatgttgttaaatgctgggatcagccaagcctgtccagagcaaagaagtgaaaagtctccaggtggagacagaacagctttcaggtaccaatgtttgattgtaacctgggtttgatgtggtccctagcagggtctccattccccagtctgtcttcctctacacactcctgcctagtgattaatagaccaggttctgatcttggtatttgaccacttcctccttcagactatgaaggttgaccacttccaaggtatgtgtttcctgtaagcagagacaaaaatcagcctgtcatttaaataagagaaaatgtatgacttttagctaaaataattgttttggccaggtgcggtggctcacacctgtaatcccagcacttcaggaggctgaggcaggtggattacaaggtcaagagttcgaaaccagcctggccaacatggtgaaaccccgtctctactaaaaatacaaaaattagccaggcatggtggcaggcgcctgtaatcccagctacttgtgaggctgaggcaggagaattgcttgaaatcggaaggtggaggttgcagtgagccgagatcagaccactgcactccagcctcggcaacaagggtgaaactctgtctcagaaaaaaaaagaattgttttacaagtatgatacttgattggttgccagttgtggaggcttctgcacactggcagctggagagtctcctggtcatttctgcctcatccatcctgcatggtctccatgcctcggagcccagacacagtgccaacaagtcaggtaaagtgggaattgggactctgatgtggaaggtggatctggaaccccgggaactccagtgtttctttgcttggaaccattttatactttctgcagatctagaaggcagctccccaaaatggtccctgggccattgcttctttgggccaaataaacaaacactgtgctcagcaagatcaagacaaaattcagcaactagtttcctaaagctgtgtcttataactctcttcaattaatactctgtgtgtgtgtgtgtgtgtgtgtgtgtgtgtgaatataatataaatgtatgtgtaggtatatacacacttctaggcacagaaatgcctacctatgttcaccaatggacatatgctacaagagtagtacactagtatactcttgtatattactcatgtatatatatatatatatatatatatatacacatagatataaaacaaataatgctaaatcccaatttagcaaaaaaattacttcctattgaatcttccaagcttaagtgcaacaaaatgtctgatcagataagagtttttggctgggcacagtggctcatgcctgaaatctcagcacttgggaaggctaaggtgggtggatcgcttgaggtcaggagttcaagaccagcctggccaacatagtgaaaccccatctctactaaaaatacaaaaatcagccaggcgtggtggcatatgcctgtaatcccagctactcgggaggctgaggatggagaatcacttgagcccatgaggcagaggctgcagtgagctgagactgccattgagctccagcctaggcgacagagtgagaccctgtctccaacaaaaaaaaaaaaaaaaaaaaagagttactaagaataagcagttaagtgatagaaggagtcccttatgagtttatgaatttgagagatttacaaatttttgcttaaatgactaaaatcttttatttgggttttagaaatgttgagctggatcccttttcagtgtcaattataagatagcagggccagttccattaaaatcccttccatttattaataataaaatcaatacatctgcacataagctcatctgcattgcaggcccatccaagagtgatatcatcagtacacatcatccagaaagtctacagtagaaaagacaaaaagtctagaatgaatactgtaatggtatggaacaactggaattggcataccctgagtggggcatgtaaatcggtataactacttcggaaaactatttattagcaactaatgaagctaaatcaatacaaaacccataacccagcaattccacttctaggtacagagatgcctaagctctgttcaccaaatgacatatgctacaaaatccatggcagcactacttacaataaccttcaaatggaagtacccaaatgctcattgacaatagaatagataactaagttgcagtataaattcacacagtaaaatacagctatccctcaatatccatgggggattgattccgggactcccacagatacaaaaattcaggaattctcaagttttttacataaaatggtgttgtatttgaatataacctatgcacatcctcccataaactttaaatcatctctagattgcttataatacctaatacaatgtaaatgctatgtaaatagttgttatactgtgttttaagaaaataatgggccgggtgcagtggctcatgccgggtgcagtggctcatgccagcactttcggaggccgaggcggacggatcacgaggtcaggagatcgagaccatcctggctaacacagtgaaaccctgtctctactaaaaatagaaaaaattagctgggcgtggtggcgggctcctgtaatcccagctactcgggaggctgaggcaggagaatggcgaacccgggaggcagagcttgcagtgagccgagatgcaccactgcactccagcctgggtgacagaacaggactctgtctcaaaaaaaaaaaaaaaaaaagaagaaagaaagaaagaaaagaaaagaatgacaagggctgggggtggtggattatgcctgtaatcccagcaactttgggaggccaaggcaggcaggtcacctgaggtcaggagttcaagaccagcctggccaacatggtgaaaccctgtctatactaaaaatacaaaaattagccaggcatggtggcagatgcctgtaatcccagctcactgggaggctgaggcagaagaatcacccaaacctgggaggtggatgttgcagtgacccaagattgcactactgcactctagcctgggtgaaagagtaagactccgtctcaaaaaaaaaaaaaagaatgacaagaaaaaagtctacatgttcagtatagatgcaacttttttaaaaatgtttttaatctgtggctggttgaatccatggatgcagaatccatggatacggggggctgactgtgcacaccaagtataaccaatcaacaaggacgcatatcaatgtggatgaatttcaccaacatgacattgggcagaagaagccagacaccgaaaagaatatacacagcgtggccaacatgatggaaaccctgtctccactaaaaatacaaaaaattagctgggcgtggtggcgcacacatgtagtcccagctactcaggcacgagaatcacttgaacctgggaggcagaggttgcagtgagccaagatcataccactgcactccagcctaggtgacagaatgagaccctgtctcaaaaaaaagaaaagaatatacagtatgatttcaaatatatagaagttgttacccttggggaggtagcgagtagaaggaagtatgaagatgaaggtgtctgggattgccagcaatgagcattggttgcatggatatgtttagaatggaaaattctgaatatatgtgaaccttccaaaaaaaagtttttaaagttgtatcagttcattacagtacaaatgtaaaattaggggaattgtttaggagtacccctcttagacccctaattaggagttggaggtctcagtctgtgaccaggattagagttcgttctatggctggaatctgggctcagccaggataaggttctgtgtggatccagtactaatcatcgctgcatcagggctctgcctggcaggagggctcgggagcctttgctctgtgtccacagctcgactgctgccgttccaggatctgaccacttgatgtctccacttcacaaattgccaagtgaggaaagagctggatagagctgcctagacacgtaccggccctgagctgggataggttggaggccatagctcagggaaagacttggaaactgcagagaatgaatccaagtggcagcaaagctggctgggctggggctggggtccaggccccatgcaacaagggcagccatggggaccacagaggcaagtccagctcagaagcccccagctttgcgcctatctcagcagcactggtcggtcattcattcagtgcttcatgagctcccgctctgaggaggaatcaatggaatcaatggaaggaatcactgaggaatcaatggaaggcaaatagggcacagtccctggcttaatggagctcacagtcaggcatacacctcctttctcctttccatcttgtccctgcctagcacgcccagctccctccaacccaaaagaacctccaatattagaatctgccccccaccaactcctcaaccaggatcccatttttcttctttgttgtctgtctccccgactagggcagatgtctaaggagcagggctttcatctgccttgtagaccctggtgatctcagggtcaggcccagatgaccaacaaatattcattgaatgaaacttggatagcagtgaggtgttcacatcatctctacagaaacaaacagaacagagcagggaaacttcctctgggtctgtggcacccagctccccagaccttgcaattctggaggaagcctcagacaaggctttttgtggggtgggtgtgggaacctgagtaggactgagagctggaggtttcagggctgggagggctgcatgacagaaggtgctattagcccagctcatgaacactgagcagttccacttcccccttttcaaagtaagcatggtgggggagggaagagacaggccttgtatcaccccttgataggcccagggacctagctattaaaaacaggaaatatgagccagcagagagtaaggaggaactaactgggggtgccctgtctgcctccaactacagggagcctgccagctaccttaattcagtctaggcagatgacagagaacgaatagaccagcttgactgaagcctcctgagagcctgggaaggagacccaggacatgagtctgggcatgactttggaggagcaggttgtaagaaaggggataaagagctagagctgcaggcagctactccctagaggaaggaggaaggagcagaagcctgagacacagacttggatggccgtgtggatgtgagcagctgtccaggaccttcagaggaccagtttgagcccatttattgggaaccaaaaatgaggatatcaggatggacctccagcaccagggtttacactctgccacccactatgcacggccaatcaacattcccagcactgtccaatagaacagtgcaatgctgaaaatttctatagctaggttttccaatttggtagtcatcggactcatgtagctagtggctaccatattggacatcagagctctagccccatgtgtaaggtgaacaaagagctgccttccaatatttcttttattccctcccactccttccattctttcacaccctcctcttgtgcctcaggctatcagtcaataattatattgtaacgagttgaatttcataggccataagctcatgtaaaatgaatatataaagtaacttatttttgtataactgaatttcatttctatcccaagtgcccatccaacctaatggcagagatttactgtaaataagttcaggttaaatgtggtcaagtgactgcttcctccctctcttcctccagagtgcatctaagtctctagacaggtcagagtgtgtagccagcactcaagcattgggaagaggggcatttggagccttagggcccactgtctatgctaggattaaactatcagtccttgtcctattcatttaatcttcaaacttcatttctgggttcttcgattcttccctttcctgcaggggcagtaggaagagctccagaatcccttcttaaaaacttatagcagcatctaactctactgttccacctgtccacatattcccatactttctatccctttgctaataaaaataaaagcagctaacatttattgaacattttccatgtaccaggaaaattctaagcactttatttatttatttatttatttatttatttatttatttactgagatggagtctcactctgttgcacaggctggagagcagtggcaccatctcagctcactgcaacctccacctcctggcttcaagtgattctcctgcctcagccttccaagtagctgggattataggcacccaccactatgcctggctaatttttcttttcttttttttttcttttttttttggagacagggtctccctctgtcgcccaggctggagtgcggtggtgtgatcttggctcactgcaacctccgccttctgggttcaagcaattctcctgcctcagcctcccaagtagctaggactacaggtgcccgccaccatgtccagctaattttttgtattttttttagcagagacaaggtttcaccctgttgcccaaggtggtcttgaactcccaagctcagacaatctgcctacctcagcctcccaaagtgctgggattacaggcatgcgccaccatgcctggccctaatttttacatttttaatagagacaggggtctcactatgttggccaggctggtctcgaactcctgacatcaagtgatccgcccaccttggcctcccaaagtgctgggattacaggcatgagccaccatgcccagtctattctaaacactttaaaacaactagcccatatagtcttcccaacaactccctgaggtaaatactgttattatccccattttgcagatcagaaactgaggcacagagaggtagtgtgaaaaaagctcacacagatagtattcttattgaggctgtggatgtgttaactagcttgacttaattcttccacattgtattcatacattataacatcactttgtacctcacaaatttatacagctataaattgtcaatttacagtgaaaagagttttgatagattttgctatttaaaaaataactaataaaaaagaaagcattcttgggctaggatctcaaaagccagtattacagatgcatttacttagcaatacaacttccatgagtcaatcccaaaaatactctggcaaatgtctgacacaagcctctttgttacagcactcattgtaataacaaggggctagaaactacccaaacatccatcaacaggggattatgtgaataaattatgatatatttacacagtggaatactatgaagccataaaatggaatgagagctatctttgtatactgtagtagagtgatcttcagaatatattgctaggctgggcatggtggctcatgcctataatcccagcacttcagaagcctgagacaggaggatcacttgaacccaggggttcaaaaccaacctggccaacctagtgaaaccttgtctctgcaaaaaaaaaaaaattgaaggaaaattagccaggcgtggtagtgcacgcctgtggccccagctgttcaaacggttgaggtggccagattgcttgagcccaggggattgaggctgcagtgagccatgttcacaacactgcacacccgtctgcgcaacagggcaagaccctgtctcaataaataaataataaataaaatataaaatgtatatacatatattatatatatatagttaagtaaaagaagaaaagtgtatggctgctagcatttatgtacaaaagaggggaaatcaatatatatatttgcttatattttttaaataaaagaaaagaactttttaaaaaatgactctcgatgagaaaggaagacatcagagtacaaagaacaagtatagaagctagagttacctgaatatacttattttgaagatttggctatggaacgatgtaaatgttccacataatcattaaaacaaaatggaattttaaataaagtaacccctaaaatgaaagcaaaatgaaatgaatgtatcaaactatgtattaaattgatggtataagtgctcagagaagaattatttcaaatgactttaaacatagtaatttgtacattcccatcaggatatacccaaaggacaagaggaactgccaaaaaaattaaagtttttaattttttttttttttttagatggagtttcgctcttgttgcccaggctagagtgcaatggtgcgatctcagttcaccacagcctctgcctcccaggttcaagtgattctcctgcctcagcctcccgagtagctgggattacgggcacgtgccaccatacctggctaattttttttgtatttttagtagagacggggtttttccatgtttgtcaggctggtctcgaactcccaacctcaggtgatccgcccccctcggcctcccaaagtgctgggattacaggcgtgacctgccatacctgaccagtttttaatcttaaaatgttttccataatcatattattaatataaattgttattttatacattataagataaagcaaataaatctaatattattgccactaaaaccaacattttcagcataagaaaaaatataaacataaaagaaataaaaatgctataccctaaattgaaatttaaaatatcagtatgaactcaagatctcttaaaactttttttctctagctctacccactaaaaaggcctagaaacaattaccactgcaataactatgagcacccctagagaaaaggttgcaatatcaaaataccatttcccacaaaagaaccagggctcctaggagaaatagctgattcaaggtctggagcaaaaaatatacaagatgaaccaagaagactttttcattccagaaagcaataaagctatagtgtcatgtcaaaagggctcagaagccaatgtcttgaagaggctcttgttgaccaaagatgaggcaattgaagcatcagtaggatctaaaataaaacagattcaaaatccataagtttataatgatactcaaaaaaagagaagtgatagattggctaattatcctgatttgatcgttacacattgtacacatgtattgaaatatcatactgtaccccataaatatgcacaactattatgtgtcaattacaggcaacttatttgctatattttccttgtttttctgaattttttttctgagctggagtttcattcttgttgcccagcctggagtgcaatggtgcaatcttggctcactgcaatttctgcctcctaggttcaagcaattctcctgcctcggcctcccaagtagctgggattacaggcatgcgccaccacacccagctaaatttttatatttagtacagacagagtttcaccatgttggtcaggctggtctcgaactcctgacctcaggtgatccacctgcctcagcctcccaaagtgctaggattacaggcatgagccactgtgcccagccaatttttttaaataagtaggtatggagccattcttgagtcaagacagtaacagcagtagcaatctttttatgatacttattatcaaattatatactttaagaatgagcagtttatgttatgtaatttctttttcaataaagcacctaagaaagcaagaaagaaaagggagggagggagggaaggaaggaagggagagaaaggaaagaaagcaagaaagaaagaaagagagagaaggaaggaaagaaaggaaaggaaaggaagaaaaagagaggaagaaaaaagaaaaaagaaagaggagggagagagggagggaaaaggaaaacttcactggattccctttgagcatgttaggacaccaactcattattttgaaaataggtaaataaagggaaagaatcaagcaccttttctactttttctgtatgaaccgtatctccttgtaaccaaataattggtgagagaaaatttctccttacagaattatttcagctaagtaatgaggaaaaaatctaaagaatttgaattttgcattttgtactttacacactttaaggaaacaatggatctaggccatgatcgtcaatgcctaggaatcgcacagaatgagacaaatatactcaatgtgcctcctggtataggtacacaatattacctatgaagcattcttgctaaaaacacttaacctgactttattaagatactagtcacatgaactagaagtcagaggaatgtgttagatcagcggtccccaacctttttggcactagggaccatgccgtagaagacaatttttgggctagaagacagtttttccacagacaagggagggagtcaggatgaaacatagaagacgatttttcatagactattttttccacagacaagggaaggggtcaggatgaaattgttctaactcagatcatcaggcattacttagactctcataagaagcatgcaacctagatcactcacatgcgcagttcacaagagttcgcactcctatgagaatcaaatgctgctgctgatcagacaggaagcagagctcaggtggtaattcgagcgatggggagcagctgtaaatacaaatgaagcttcgctcagtggcccaccactcacctcctgctgtgtggcctgttaggaatcaggccgaggaccagtacaaaggattggggactcatgtgttagatgacaccacagggatgcaatccacaaaccagaagatagaagactctacaagataaatgccatatatatatatatatatatatatattttttttttttttttttttttttttttgagacagggtctcactctgtggcctaggctggagtgcagtggtgcaatctccgctcactacaacctccacctcccaggttcaagtgattctcctgcctcagcctcccaagtagctaggactacaggcatgtgccaccacacctggctaattttgttgttgcttttgtttgttgtttgggggggggggtgttggttgtggtggtgtttttatttgtttgtttgttttttggtagcaacgggttttcaccatgttgaccagtctggtcttgaactcctgacctcaagtgatccaccagcctcagcctcctaaaatgctgagattacaagcatgagccaccctgcccagcctcttatttcttcaataaacgaactgaagacagagcaagggaaaatctctccaatcctgcttattccaccttccacacttaaaaaagagagaaagggagagcctaaagggtaaaagagacttaattattaccaatcagtggattgtgtggaccttgtttggatcttgtttcaaataaacacattacatgcaacaattgggtatacacacacacacacacacacatagacatatatatatatatatatatattttttttttttttttgagacagagtgtagttctgttgcccaggctggagtgcagtggcaccatctcggctcactgcaacctctgcctcccgtgtagctgagaccacgggtgcatgccgccatgcccggctaatttctgtatttttagtagagacagggtttcgccatattggccagactggtcttgaacttccgaccttaagtgatcctcccgtctcggcttcccaaagtgctgggattacaggcatgagccaccgtgcctggccaattcagtatatttaaacatggactggatattggattatattaagaattgttgttggttttttttggtgtaataataataattgtggctacatgtttaaagttccttttttagagcgacatggagaaatgtttactgatgaaatgatatgatgtttgagatctgcacagaaattattccataaaggagagagtagatgggcatataattaaagaagtttatctggccgggcgcggtggcttacacctgtaatcccagcactttgggaggccgaggcaggtggatcatgaggtcatgagatcgagaccatcctggctaacatggtgaaaccccgtctctactaaaaatacaaaaaaaaaaaaaattagctgggcatggtgggggggcgcctgtagtcccagctactcaggagactgaggcaggagaatggcatgaacccgggaggcggagtttgcagtgagctgagatcgcaccactgcactccagcctgggcgacagagcaagactccgtctcaaaaaaaaagtttacccataagttgatcactttaagttgggtgatgagtatgtaagggttcattacattattctctttacttttgtaaatgcttaaaatttcccatactaaagaggagaaaaagctaatatttgcttattttcatactttctgcacttctgctataaaaaccacctccaaggccaaaggaaccagagaaatgtgataagataaaaggcattatacaaaaaaagaaatacattggctagtacttcaaactacttagaaacagatgtatagaccaatgaaacagaatagagagaacagaaataaatccctacaactacagccaactcatttttcaacaaaggtgcaaacaacacacatcgggggaaaggacagtgtcatcaatacatggtgccaggaaaattgggtatttatatgcaaaaaaattaaactagacccctacctttcaccatatacaaaaatcaactcaaaatggattaaacacttagatctaagatccaaaactatgaaactctactagaagaaaacatggggacacattttttgacattgttttggacaagggttttttagataagccctcaaaagcacaggcataggctgggtgcagtggctcatgcctgtaatcccagaactttgggaggccaaggtgggcggatcacgtgaggtccggagttcgagaccagcctggccaacatggcgaaaacctgtctttgctaaaaatacaaaaactagctggtggtagtgacatacacttgtagtcccagctactctcagaaggttgaggcaggaaaatcgctcgaactcggaaggtggcggttgcagtgagctgagagcacaccactgcactccagcctggacgacagaacaagactctgtctcaaaaataaagtacaggcatcaaaagcaaacatagacaaatggaattacatcaaactgaaaagcttctgcacaaaaaaacaacgcatgaagagataacacacagagtgggagaaaatatttgcaaactatacatctggttaatatccagaatatataagtaactcagacaactcaatagcaataaacaaaaacaaaaacaaaaaacaaaccaaatagtccaattttaaagtggaaaaaagacctgaatagacatttctcaaaataagagttacaaatggccaacagatatttgaaagaatgctcaacatcactagtcatcagggaaatgcaaatcaaatccataaacagatatcatctcactccagttagaaccattattatcaaaaagacaaaagacgagtgttggcgaggatgcagacaaaagggaacccttacacgctgttggtggaactgtaaattagtacagctgttgtagaaaacagtatggaggttccccccaaaattaaaaatggaactaccatatgatccaggaatccaactactaggtatacatctaaaagaaataggctgggcccagtggctcatgcctgtaatcccagcactttgggaggccgtgacaggtggatcttgaggccaggagtttgagaccagcctggccaacatggtaaaaccttgtctctactacaaatacaaaagattagctgggtgtggtggcacgtgcctgtagtcccagctatttggaaggccgagacaggagaatcacttgaacctgggaggcagaggttgcagtgagccgagatggcaccactgcactccagcctggacaacagagtgagaccctgtcttgaaaataaaataaaataaaggaaaggaaaggaaaggaaatcagcatgtcaaagaggtatctgtgctcccatatttattacagcattattcacaatagccagtgtatggaatcaacttaagtgttcatcaatgaacgaatggatgaagacaatgaagtacatgtaaacaatggaatactattcagccataaaaaaggactaaatcctgttcatttgtgactacatggatgaatctggtgactttatgttatgtgaaataagccagacacagaaaaacaaactgtatgttcttatctgtggaacctaaaaaaatcgatctccacttggcacagtggctcaagcctgtaatcccaacactttgggaggccaagaaaggaggattgcttgaatccaggagttcaagaccagcgtgagcaacatacgaagactccatctctacaaaaaatttaaaaatttttctgggtaggcgcagtggctcatgcctgtaattccagcactttgggaggctgaggtgggcggatcacaaggtcaggagttcgagaccagcctgaccaatatggtgaaaccccatctctactataaatacaaaaaaaattagccgggcatggtggcaggcacctgtaatcccagctacttgggaggctgaggcaggagagttgcttgaacccgggaggcggaggttgcagtaagccaagatcgcgccactgcactccagcctgggcaacagagcaagactctgactcaaaaaaaaaaaaaattctgggtggggtggtacattcctgtggttctcagctactcaggaggctgaggcaggaggatcacttgagcccagaagttcaaggctgcagtgagctgtaattgcaccactgcactccagcctgggtgacaaagaccctgtctcaaaacaaaaaaagaatttttgttttaaatctcatagaagcagagagtaaaatagtggttactagaggctagggagggattggtagagggaggaggaggagaggttggccaataagtaccacgttacaattaggtaggagaaataagttctggtgttctattgcacaatagggtgactatagttaagaataatgtacatctcaaaatagcagaaaagaggatttgaaatcttctcgccacaaagaaacgataaatgtttgaggtgatggattttttaattaccttgatttgattatcatagtgtatatacgtattgaaacatcacattgtaccccataaatacaatcattatgtgtcaattaaaaataaaataattacaggtgtgagccaccatgcccagcctgaagtgccctattgaacatatgagtctagagctcagactatctccctctcagataccaaacaacccttatttatttcacactggtcttctctttattttattttatttatttatttttttttttgagacggagtcttgctctgttgcccaggctggagttcagtggcatgatctcggctcactgtaagctctgcctcccgggttcacaccattctcctgcctcagcctcccgagtagctgggactacaggcgcccgccaccacgcccagctaattttttgtatttttagttgagacgggttttcaccatgttagccaggatggtctcaatctcctgacctcatgatctgcctgcctcagcctcccaaagtgctaggattacaggcgtgagccaccatgcctggccccacactggccttctttcttttcctgaacaggccaagtttcctccagcctcaggaccatggcattgctattcctgttgcctggcatatttctcccctagatggccacatgactagctcttaaacattcagatctcaggtcaaatatcatctaatgagaaaatccttgctcggtcgggcatggtggctcacgcccgtaatcccagcactttgggaggctgaggcgggcggatcacctgagcccaggagttctagaccagcctggcaaacatggtgaaaccccatctctactaaaaatacaaaaattagccaggtgtggtggcaggcccctgtgatcccagctactcgggaggctgaggcagaagaattgcttgaaccagggaggcggaggttgcagtgagccgagatcgcaccattgcattccagcctgggtgacagagtgagacactgtatcgaaaaaaataataataataaaaaagaaaaaaaaagaaaatcctcgctcaagacccaagctaaaatcaatataaggagtgagccagggatccacattggtcagattttgctgtgacaatgatgcataaaagacaacttccagaagcctggtgcttacagcagtaaacattcacttcttgcccaggggtctgtgggtcaagctggggctctgcagggctttctggggctagctgggctgggctccaggctttggggtgagtaggtggctgtctcatatatcttctcatttggagtccaggctgaaggagcctccactgtctgggacttgtggttctcatggccgaggacagttgctcaaagggatgaatggaaacactttgtgccttgggcctggcccctgtgacttccacacatattctcatggccaaagcaagtcacgtggccaagtgcaatatcaacagggtgaggaagtatattccttccgtggtggtgggggctggggaaagtaaatatttgctgaacagtaatacaatctaccaaatcacccaattctttttttcccccagatggctatgtttattgagtcatccctccacattcttatgaaataccatcttttacaaacgaatgaatgaatgagaaatgtgcctttcaaggcaggaggagcctccccatgcttcaaatgagaaacctgaggctcagagaagggagtgagtcacccaaggtcctagaaaccacctgtggcaagcccagcctgtcgggctcctcagttcacttctctacatacaataaatgaggcaggaaagtgcaattttctgggcagtgaggacacatcacccgtcctgccctcccactgaggcttgttgacaggcccataatcaggaggcaagtataccaaaaggtttccttgctgattcaatctcggggctcactctgaaaccaagtaggaccttgatttgtcatttccgggtctccgaaccacaaatgttaagtacgtattaaatgagtgagtcactggtcctgtggacattttaattgctgattaagtgttccatgaattctgggtcccgccccaactgtgcctgcccctaaggtacagacagtcacctctacttcttcggggacctgcagtgtctaacaccgactagggtacacagtgacactcaaaaatgaggcataggcatataggccgggcattgtggctcacgcctataatcccagcactttgggaggtcgaggcgggcagatcacttaagcccaagagttcaagatcaccgtgggcaacatggcaaaactctgcctctacaaagaaaaaaaaaagtcaggtgtggtggtgtgcacctgtggtcccagctacttgggaggctgaggtgctaggattgcttgagcccagaaggcagaggttgcagtgatccaggatcacatgccactacactccagcctgggtgacagagtgagaccctgtctcaaaaaaaaaaaaacaaaaaaaaggtatagggcttaggcaaattctggaaggacatgcctcagataaacagtgggcaacccttttgaagcaagtttacttagaactttaactctctgctttcggtctttatgtagcatttgaacactccacaatcagtatagattgcttctataggcgtgagtataggtatgcttctgattgcacaggtagcattcagagaaccaatctgaaactggtctaagtccatactagtgtgcaaaaagcaattacttgctgattggttgggaaactcctgaaaatcatcttcctccagaatccttctcccacacattatcagaagcctgctttcagaaacactgagtcaattctcaaccactccttcagtcagtaagcccgggagcacctacagcacgccaagtgatgagtgagccaccagggtgacaggtgataggcagggaaacaggtggtagccagagtcagtggggcctgcattcaaaccattgctgacatagatggcactggaccatgggccagacactgtgctaaacgccccacaaggattatcacgtttaatccacacgacaagttgatgaggcaggcactattattatcctgtttgacagctgtggaaactgaagtgcagagaggcaaaggaacttgcccaaggtcacataactagcagatggtggaaccgacatttgattccagagtctgtgatccccactgtgacccaaaactgcttcccactaggaacttgtccagattccacaggcagtaagtgacagtcaaaattcaaactcagaaaggttcatcagcctccaaagaatattgtcttaactgataagacgtcctcccttccaactccctccatttctggatccaacaccaacatgctgggtgaccttggggagcctccctgacctcagttttcatggctgcaaaatggaaagaacactgcttaccttaaggagctgcagaggggcttttatgcgaagacagttcctcctgtagaaatatggtaggcactcagttgagatacatctgtgttctttctggtttccaggagtttggggcagttggacaagtgggcactggagcaagtctgtgtgataagctctatgactgagagtggactaagtgctgggccagaggctgcacatgggatggaaagccaagggctgctgtgtacccagaaaactcaactgaaggaacactggaataaacaaccctcagaaggagggaagctttgttcgtcatctttcctgttttcctagtctggcccagttccaaaacctcttcttaatcgtgtcaggagtttggcccagtgccccaggaaggagccgccaggaggcttatagtgagccaagtcttcaaggaagtgatgtcttctgtaagtcaagagaaggcaagaaactttctgggagagagaaggagatagggacagaaacagggaagcgctcagctggaagacccttccttgaagaagtggagaaactgaggcttagaacagagcaaggtttactgattgtgctggtggcacggttggggcaagtagcttgtcttccttcctcccaggtcagagtcctctccactgcatgtattgactgttcacccccttcctattctaggactacccaggcagggggagctgccttcactcaccctttcccactactgcttccagaaacatctccccatcactacactagggactttgtaagcacagatgtgggacccatgagtactacagaaggaagcagaagctgcaaagaccttggtaagttcggccatgcgggaaacgaggatgacagaccctctgaaagaaagaaccagtgcttcccaacacctactgtgtgtctgtgcaatgccaggcacatccaacatgtcattatgggatccttgggctgtcacttcaccagccagaaacctctgtagccagtggtgcctttgccagagttttgctcaggctcattgcgcccacttggcctggcaggctatgctcagctcgtgctaatggcctggatcccctgcctgccaagggcgagcggagcagcgaggatatgtgtgagcaagcaagcgtggggtccagccactgtgcacagccaggaacaatggctgtggtggagtgggcagctccaggtgccagcatgagtgctggcttcttacgaggctgcagctggaacaggcatcctgcaagcagcttccactgctgccactggggaatgcaatggttcctgggggcttggatatgtcaggaaccagacccccaaagagggtgtcacagccctggctcagggagctcctaggtctggggtccccgaagggcctcagctcttctccccttcttcttacccacaacgtggtgagcaagaggtgtgtttcagccgtgtttgtgttacagcgctttcagccctgccattcaggaggtcctgagttcttgtcccatgcccgggaagaatgaggtacacagacaagtggagggtgagcaagctgaagagctttactgagcaatagagcagctcagaggagactcacagtgggtagctcctctctgctgccagggtgtcccattaatgttcaactttaatgttcagctctcagcagagaggagctacaagaccctggaatgggtagcttctctccgcagctggtcatcctgatgtctgctgagctcccagcagagaggagacttcagaggggatagctcctttctgcagctggttgtcccaacatctctctgagtctggctgagtccaggttcttatgggcttcagaggggaggaagtgtgtgctgattggtccatggttggccatgggcaggcccagaaaaggcaccataagttcctactccaatctgcaggactggcagcctggcccccaggcttcaggccttcccaggattgaaggtggggcttcaccagggacccacccctttttgtccagagcctatctgcctcctgccactgttcatagcacccaggctgttcaggcagaggggcacctgcaggccagtgctgagctgccctcagcccttccttggtctcccttccatgttagtttgtgcccaaagtctgaagtgggccaaggtggcagggggctggtgtgtcagtgctgccccaagcatgcacacacccagctgggttgcgacagtgcctgggatcagcctcaactttgctctgaaatcgaagcaggtgccaggagcagggaaaggccaggcagtggaagcaggcatttctgagcctgcaggggcaggggggccttcctgggcccccaagagtgcagagatgcctgggtctgcagccctggcttgggcagctgcagctgcgcccaaggagcatgaagcttccaccctgtcaactcagaagacggcagggcttctgcctgttcccggctcctgctggttctgtggagcacctcccccactgcagcctgcatcatggcagtggccactctagacaggccaccactgccatcaatgttacataatctaatcatcacactaactctgggaagtagattacatccccattttgcagataaggaacctaaggctcataggggagacatttcctgcccaactctatctccagcccataactgtcttccaacctctaaacctggctatctactttgtctcagatattcctacttataaccccacatgcttctcaaagtcaccttgaactcatcctcttcccctcccatagatttctggtctcccatcatagccttactactcagaaccccagatactaatgttgactccaccctctcccctatttctatctccaaatagcctgggattagtggtccccattccaagtctatttcctagacattggccttcaattcaaagggatgtagcatagtccagacttttatcatctccctcttagataacttcaacagtttctgtaaaagctcctctgcctccagtttatccttccatccatccataccccactcaaaatgtcaggggcaatctttctaaaatgcaaatctgtctagtctcaaccagctgaaaactctgccatggcttcacagtgccctcaggataaaccctttacagaggcttgcctggccctaaaagtcttggcccttgctgccttctctggggtcaggttgggtcactgtctaccctctgcccctgaagccttggacgtcctggaatacatacagttcctctttcacttcaaggctttgacccctgctgttttctctgccttcctccagctaactccttctcatctttcaggtctcagcttagtcaccacttcctgaccaccctgctcttaggcttcctgagctgcccttccagtgaatcccgcagttcccttatacttcctacactgggttacccaccccctccttctcacattcccctgtacagcccaaaacagccttccccagcagcacagaacactggggcagcactctccaatgaaaatacaatgcatgccacgtgcataattataaatttttgggttgggtgcggtggctcatgcctgtaatcccagcactttgagagtccgagatgggtggctcaagtgatcatggtaaaatcctgtttctttttttttttttttttttttttttttgagacggagtctcgctctgtcgcccaggctggagtgcagtggcgggatctcggctcactgcaagctccgcctcccgggttcacgccattctcctgcctcagcctcccaagtagctgggactacaggcgcccgccactacgcccggctaattttttgtatttttagtagagacggggtttcaccgttttagctgggatggtctcaatctcctgacctcgtgatccgcccgcctcggcctcccaaagtgctgggattacaggcgtgagccaccgcgcccggccgtaaaatcctgtttctacaaaaatacaaatattagccaggcatggtggcatgcatttgtagtcccagctactcaggaggctgaggtgggaagattgctcgagcctgccgtgagccatgaccatgccactgcactccagcctgggtgacaggctgagaccctgtgtctaaaaaaaaataaataaaataaatcaattttctagtagcctctgtctcccaggctcaagtgattctcccacctcagcttccaagtagctgggaccacaggtgcacatcaccacacccagctaattttttgtagttttgatatagatagcatttcgtcatgttgcccaagctagtctcaaacacctgagctcaggggatccacctgcctcagcctccccaaatgctgagattacaggtgtgagccattgtgcctggtctctagtagccacattttaaaaagtaacagtaaatagatgaaattaattttaataacaaattttaacccaatatttcaacatatatcaatataaaaagtatgcatatttcattttatttttgtactaagaatctgaaatccagtgtatatttcacactcacagcacatctgagtttgaactagccacatttcaagtgctcagtagtcctgggtgctagcggctatcagattagacagtgtagttttagaggatgcttacagctaactggcctatgtcctgtactggaggacattcattctgagaaaaattcatagaaattttcctctttggaaaaaaggattctaagtcagaccggtcactgacagagtgaaacagggtttttaattctttaggacctcaagagtcttctctgtgctagtgtgagatgtgatacagaccagagaacatgtaacatctccccagcttacttgagctcagagctctgttttcataaagatttctggggaatgagatgtgataaagaccagaagagcgatatagcatttccccaacttatctgagctcagggttctgttttcataaggcctttcgggggattagtgtccagtggaatgttctttggcaaatgttgatacagccacatgcctgactcagtagatcccaggatccccacaggaagaatgtagagttgaggaagtctgcctcaagtgcctcagcacctgagactcgattactgaattgactaaactaattatgggaggccatatagggcaggactagaattagtgagcaaaaattgcagcatatttcagctcaaacaaggatttttttttattgtgtgtgtatgtgtgcgcacacatgcgtgtttttaaaaatttaaatctaagttgccagatctgtctaaaaaatgcaatatgtggccttgtgagatgatgatttctctgtcactcataatcaaggagtgatgaaggctagagttctttgtggggtagggggctcctaaccagagtctctaatttttttttccagaacttaaaaaaggtaagaaaaaaagcaacaatgggcagagaacttgagcatcagaggaactgatcagacatgctctggaccatttattaagagcacactttgggattctggagccttcagtggaagattggtttatagccaaatcccttttgaggctacagattcttggttcagttcagatgattttttttttttagacagtctcactctgttgcccaggctggagtgcagtggccaccatctcagctcattgcaacctctgccacccaggttgagtgattctcctgcctcagccactctagtagctaggattacaggcatgtgccaccatacctggctaactcttttgtatttttagtagacatggggtctcaccatgttggccaggctggtctcaaactcccatatctgcccacctcagcctcccaaagtgttggattacaggcatgagccactgcacctggcctatatcacactttgataaaaggttttaaggctgggtatgggctgggattacacctgtaatcccagcactttgggaggctgaggtgagcagatcacaaggtcaagagattgagaccatcctggccaacatggtgaaaccctgtctctactaaaaatacaaaaattagccaggcatggtggcacacgcctgtagtcccagctactcaggagactgaggcaggagaatcgcttgaaccagagaggcagaggttgcagtgaaccaagatcgtgccactacactccagcctggcaacaaagctagactccttctcaaaaataataataataataaaaaaagggttagccatgctaccgagaggcccctaaccacccacagacagacagacagactgcagatggaatcagaccaatcatctcagagcctccaggtgcccatcagtaagatgcctggaaggacctggaagctgaggcctttaaaggttgggctcagtgtctctatgtcaagcacggggcctggtacaatgtaggtgttcaaatagttgtctccttccttcctcatacctggattttaggtgtggcagttccagaaatgccatggcctgcgtaagaagggtctggagtgcctcatttaaagctcacaaggatcacagaggctggcacagctgggctgagaacagaaggggaaacgaaaccctttcatggctcacatatgctcaagcaactacaaagaagccacctgtggtcagctgaagagtggatgggggagaaagagggagcttcagagaagtgggggtggtggtgaggaagaaggtttttaggtggtagaagtggaggaggtcaaagaaaacagcagttaagaatcataggcaatacaccatagggtgagggtaggggtggggaaggtaggttttgggtggtggagatgggaaaggttaaaaaaaaaccacagtggttaataataggcaacacaccatccatcgtgcggaggaagaaaccctggacttagaattatgtgattttggcaaaacatgtaaccaagcagctctctcatctgtaaaaatgggacaataatagttcctttctcttggggttattgagaggttgaaatcagttgatgcatgaaaaatgtacaaatcttgctgttgctgttaataataacagtattgataataccgtaggaagaagcttctgcttctgaaaggagaccaggtggactgatttgggaaccaaaaacaaccagaaatctagagggaaggggagaaggcaaggagagatcttgatctaggtgcaccagaacttatatgcaaaatgctgtttttaagtgcataggtattaatatttattagaggaagagataccatagcccacatcagcttctcaaaggagtctatctcacacacacacacacacacacacacacacacacacagacacacacacacaatagtttaaaaatgactgatctagagaaattaagagccaagagaaagaagcagatgagacaagaggcccacaatcatccatggttggaatgagccatctccatggacctaagacttgggatcaggggtggcggaaagtataaacagaagaggcaaaaaaaagagtttgttggaatgaagacttaaagaaccaagtcagctcacagtgggaatggaatgggggttagttcagctatcacatggcccagagcaggctcacagaggctgttggctgaaggctgggtgagtggatggatgggcagggagcccgacccagcagctgaggattggggaaactagggaggcagactgcagatcaggaggcaaggcataagagagaccttgactctagaagactggcagggattgactggagaaatgatttccgtttgcctggtgtgatgggaaagaactgtcagccagtgtatacttctccccatctaaaatacttctgattctgtgggtgaggatttgcaagaaggcactctgccagggggagggacttaactgttggctctgtggctgtttcaggaacactctagggcagaggggggtggggtgggcagagacttttctttttgaaatttgtgagtttgtaccctgacttgcccatttcattcatgtattcatgcaacaaatatttcttaagcacctattatgtgcccacctttctgccaggtgttggagatgcaacaataaataaaagatagaatagtccctgaacttaaaaatcttacatctagctgggtgccatggctcacgcctgtaatcccagcactttgggaggccaaggcgggcagatcatgaggtcaggagatcgagaccatcctggctaacacgctgaaaccccatctctactaaaaaataaaaaaaatattaaaaaaattagccaggcgtggtggtgggtgcctgtggtcccagctactcaggaggctgaggcaggagaatggcatgaacccaggaggcggagcttgcagtgagccgagatcgcaccactgcactccagcctgggcgacagagcaagactccatctcaaaaataaaataaaataaaataaaatcttacatctagttgaggaaatggataatgagagtgcagtatgataggtgctgagactggggccatgcgcaagttgctataggaacagaggaaaagggcactcatacttccccaagcctgtcttctttttatttatttatttatttatttatttatttatcatttgagacagagttttgctctttagcctaggctggagtgaatggtgtgatctgggctcactgcaacctccacctcccaggttcaagccattctcctgcctcagcctcccaaatagctgggattacaggtgtgaaccaccacgtccagctaatttttatatttttaatagagacgaggtgtcgccatgttggccaggctggtctcaaactcctgatctcaggtgatccacccgccttggcctcctaaagtgctaggattataggcgtgagctaccacactcagccttaagcctcaatcttcttatctgcaaagtgggaatcatggccgggtgcggtggctcacacctgtaatcccagcactttgggaggccgaggagtgtggatcacctgaggtcaggagttccagaacagcctggccaacatggagaaatcccatctctactaaaaacacaaaaaaattagctgggcgtgttggctcgcacctgtgatctcagctgctcgggaggctggggcaggagaatcacttgaacccaggaagcagaggtcacagtgagccaagattgtgccattgcactccagcctgggcaacaagaacgaaactccatctcaaaaaaaaaaaaatgggaaccatgttattcactataaggagttttctggtacattccaggcctctgcttgacacatattaggagcccgttgcagcccataattcatttattcaacaaatgttaattgagtatcttatgtgtgtcaggcacttctgtggatggtagaaatgtggcactaaataaactgagaaagccgggcacggtggctcatgcctgtaatcctagcactttgggatatcaaagcagaacacctttaagctcaggagttcgagaccaatctgggcgacataggaagactctgtgtctacaaaatataaacaattagctgagcatgttggtgcacacctgtagccccagctgctcagcaggctgaagtgggaagattgtttgagtctaggaggtcaaggctgcagtgagtcatggttgtactgctgtactccagcctgggtgacaaaataatattatttttgtctcaaaaataataaataaataaataaactgataagaattgctgctgtcatcaagattacatactacacggggaaaacaataagtaaaatattccgtaggccaaatggtgacaagtgcattggagacaaataaagcagggatggaaagagggaagaactgagggaagggggttgtaattttaaatagagtagtcagggcctgtcttagtttagcaaggatctgaaagaagagaggcactaggccatggagatatctggaggaaggacgttcgaggtagaaagatccacaaatgaaagggctaatgctggagaatgagtggtgtgtgataggcttttacagagcccagagtggctggaaagaggtgaccaaggtgtacagcaccagcagatgaggtcaagggaggccttggaggggagcaggtgtggcagagccttggggccattgtaagtctttgactttaccctgaatgagatgggagccactggagagttttgcgcagaagagtgacaggatcttacgttttgttttgttttgttttgttttgttttgttttgttttgttttgtttcaggaaagagtctcactctattgaccaggctggagtgcaatggtgcaatcttgactcactgcaacctctgcctcctgagtttaagcaattctcctccctcagcctcccaagtagctgagattacagacatgtgccaccatgcctggctaattttgtatttttagtagagacggggtttcaccatgttggtcaggctggtctcgaactcctgacctcaggtgatccacccgcctcagcctcccaaagtgctgggattacaggcatgagccaccgcacccgaccttcttctttctttctttcttttttttttttttcttgagatggagtctcactctgtggcccaggctggagtgcagtggtgcaatctctgctcactgcagcctcagcctcctaggtttaagcaattcaccctgcctcagcctcccaaatagctgggactacaggcgcccgccaccacgcctggctaaattttttgtgtatttagtggagatggggtttcaccatgttggccaggctggtctcgaattcctgacctcaggtgacctgcccacctcagcctcccaaagtgctgggattacaggtgtgagccactgtgcccagccctttttcttttcttttcttttcttttctttttttttaactgacaaggtctcctctgtcacccaggctggagtgcagtggtatgatcatagctcactgcagcctcaaactactgggcttgagatccttctgcctcagcctcctgaataactgggactagaagcatgtgccaccaggcccagctaaatttttaaaaatgttcgttgaaatagtatctcactgttgcccaggatgatcttgaactcctggctctaagtcatcctcctaccttggcctctgaacgtgctgagattacaggcgtgagccaccatgcctggccaggatctcaagtcttaaataggaccactctgttttaaaggatcacttgttctgactatataccatgagatgacaaacatagagcagaggacaccagttaggagactcccacattaaaccaggtggagatgatggcaatttgggctaaagtgaaagcaaagggcatggtgagaaatggttaacatcaggatatttgaaggtgaagtcaacaggatttgttgacaaattggataagggggagtaggcaggcaaaacagagtcaaggatgcggggcgtggtggctcacgcctgtaatcccagcaccttgggaggctgaggtgggcagatcgacaggtcaggagttcgagacaagcctgaccaatatggtgaaaccctgtctctactaaaaatacaaaaattagctgggcatggtggtgtgcaactgtagtcccagctactcaggaggctgagacagaagaattgcttgaacctgggaggcggaggttgcagtgagccgagatgttgccactgcgctccagcctgggcaacagagtgagactctgtctcaaaaaaaaaaaaaaaatagtcaaggatgacctgagccattaactatgattggggaagaccaaaggaggaacaggcttgagaggaaagatagagggttgatttgggacacattatgtttaagaagcctgttggaagtccaaataggaatattaggtaggcagctggatacataagtttgacacctgggggcaaggccctgattttaggtatgaacttagaacttctcagtatatagttggtatttaaagccacaggagtgaataagatagtgaatcaagaggacaaaggaaaaaggtctgaggattgagcccaggggctatccaacatccagcagtgggggcctcacctgcttttaatttgggggttcgaaggctaggtttgaacattctgtaaggacttgtgcaaatattttccctaagttctgtctccccctttgaacccaaatgctcaccatgaagggaaaagtccacagaagaaaaaaaaaaagttttaaatagattgtttaaattattaggttatgttttccaaaaatagaaggaaagctaagttctgggtcagtgggagaatttagagtttttagcattatctttctcccatcaaacccttaaggctgggctcccaaggaagagtcttcctggctttccagccctgagggctctctcacaaggtcccagaactctgtattgtaattgtctattttctctacctccaggtggaagccatgttgagttcatcacagaactactagccgggcctggcaccaaataggcatcagggaatgtcagtggaacttgactgcagaatctgatgaggaacttccatcttcctgggctctgagtgtctttctctagttccaccaccagagctggtgtctgttctgccaggcccctttccaggcacccatagctgatcctggaaaggtagggacagaccctgtaggcctggactctgtcctttgggaggagaatatcctcaggggcctgcatgagccatcctgaaaaactagttctgtgagtcaatcctcaagtgagttcctgtgggaaaggtaccagaatcttagaggtgaggttggaagcagcttgtcacctcttagaggcaaagaggggtgtctcctccgaacggacctcactctttatctgacccagagttcctggcatatcaactgtgctagtactttgtcaagggtgctggcatgagccaaaaggccctgaactggaaattgcagaccctcctattagacatgagtgtgtcatgtccatcataaacaaagaaacaaaaaccctctcttaacgcaggctactttagttgctgcattatattctgcctactgtttgtagctaaatctcttgaatgacttgttcaaacttgctatctccacttcctcaccttctatttcattcttaactcaggtccattcctaaaataaggctgtccttccaggccctcccaaatgatgtcatctagtgtaattaactccaggtactaccatgatactaataacctgcagtccctctcctgagctccaaactcacgtattcagctgcctattagacatcttgactcagctaacccacagacacttcaaactcaacatgtacagaatgaactcatcatctttccttaaaacagatcccaagtgttccctgtctttgtgaatgcactgccatcctcatccttgactcccccactccctttcctttgtatatataatcagtcactaatacatcaaccctatgtcatgaatatccccgaaacacatacacttctctccatcctcatggcttttttgctgatcagggccatcatcatcatttttgcctcaatgatgacaataacctcttaactgtattctaacaagctttgtgtagtgttttgttctgttttagagacacggtctcactctgtcactccgtagagtgcagtggcatgattacagctcactgtaacttcaaactcctgggctcaggtaatccccgcacttcagtctcctgcctagctagggactacatgtgcatactcccatgcctgactaatttgaaaaacatttttgcggggagagatgaggtcttgctatcttgccttgtctggtcttgaactcctgggctcaagcaatccttccaccttggtctcccaaagcattgagattacaggtgtgagccaccatgcccagccaagcctcaagtcttgaatactttaaatccattttctttcttttttttttttttttgacagcgtcttgctctgttgcccaggctggagtgcaatggtgcaatctcagctcactgcaacctctgcctcccaggtttaagcaattataggtgtgtgccaccacacccagctaatttatgtgtgtgtgtgtgtgtgtgtgtgtgtgtgtgtgtgtgtatttttagtagagacgggatttcgccaagttgcccaggctggtttcacactcctgagctcaggcaatctgcccacctcagcctcccaaggtgctaggattacaggcatgagccaccatgcctggcctgtaggtaatattttctaaaacacatattatgttcctccattgctcatagcaactctcagtgacttcccagtgctatgaagataaactgcaaatgccttagagaccctgcatgaactgggccttgcttacctctccagcttcatctctcactactcctcttcaccctctaccccttagccatactgaattaccagcagttccccacataaaccctgctctttccagtttccaaatttttgcccatctgttctcttggccttgagtgcttgtctccctcacttgccttctttattctccccaacctttacctggctgacttctgtttccattttgagacctaagtttaagtgccatttccactggaaatccgtgcctgactctgtaattctggatggcagttcttctaaagggctcctaccgcaaacacactgtactttatcctcgaggcactcatcacagtaagtgacaattacttgttcccttctctgtctcacccaccagacctgagctccttgagagcaggggccttgtctttctagttcacggctgaattcctaatactagcttagtacctggcttatagttgattgtgtgtgtgtgtgtgtgtgtgtgtgtgtgtgtgtgtgtgtgtgtgatgcagggaagccaaagaagggtcaggatgcaatgataacctggggaaggagggacaattacaaaggaaagtcttgggcagattccatacaggtagtagccaccaatgggatgtggaggacaggatcaagggttaactcaagaggcttcaaggttctgagcctgagtgactgggaggaatagagctattcactaagcagagaccatagaagcgaagggcagtttcaggagaaaagctgaacccaggaccaaagggctgtgggggtcatcaagtggacacatgaaataggcatatgggtaaatatttctatggttctaaaaaggagtcaaggctggagacattcatttaagaagctacctggccaggcacggtggctcacgcctgtaatctcagcactttgggaagccaaggtgggcagatcatttgaggtcaggagtttgagaccagcctggccaacatggtaaaatctcgtctctactaaaaatataaaaattagccaggtgtggtggtgggcacctgtaatcccagctactcgggaggctgaggcaggagaattacttgaacctgggaggtgaggttgcagtgagctgagatcacaccactgcactccagcctgggcaacagagtgagactccgtctcaagataaaaacaaggctaccaagatgggggcatatagagagaagacaagtgtgatgatataatcttggggatccattaaattgtgctgaaagaagagagggagagagaaatggtatttggacaggtaagaaaaaagccaggagaattaatggtcattggatccaaatgcaaaggacctcaaagaatgtgctcatccacctcattgagtgttgcaggaaggtggagaagaataggctactctacttggaaactaggaagtccctgattagaatagaagccagaccaacagtgttaaaggaatgaaaaataaagcagaaaaggcagcacatgtagactgtcctttctgaatctttcaaacacaggtgagggcaacagtgacctaaggacaacttgggaagcaggttaggggttctaagactgggctccatacacacactgcttaagttcaaatcatagccccaacactcaatagctgtgtgactttgggcaagttaacttacttaactttcctaagtctcagtttccttgtctaaaacggtgggacaagtagcccctgtttcatatggttattgcaatgattatatgaaaatgtatgtgaagcactcagcacagggcagagacgtggtaagcaaccaattaacgtgagacatgaattttaacagggtcaaggaggaaaactgggaggaggagaagttgccatgcaggagggagagaagatgctcgggtgaactaggctttgaggaggtggaagggaggggactgaggacttggagggcttgtggagagggaggatggggaagtaggccttttcaaaacccaactttggctaaaggatcacctgctggttactgaatgaagcagctacttctgttccattttcttggggagtcatgctgaggcatctctaggagcttctctcactcctagaatcttccagtgtttcctggagcctggtctctgcctctatgcctcccactgcctgctggttctctagctggaggcagctggactcaggcagccgcaggatgtcccagcagcacacattgggagagggggattcagagagagctgcttcacaacttctctttgggctatacccttgacacaggccaaatccttctgtccccgtcacaggtacagatactttctatcttcaggtattccaaatgatcttccatgattaaggttgcttctgaaacacaatggtctccctggacctccgagctaatctgcctatttccagtgtcagttccaccaaactgttccccctctgctgcctgtgattgttctcatacctgtttaaaaccctgtcataattcaccttgcagtatctccaccagaactgggagggcctctcccacctgcccagcctacattggttatatcttcacttttaccctctgctccatcctgaccaaagctatggctctgcatatattgcctctcttcttgcaatatcttttcttctcttccacgggctagcaacccctcatctttcaagaatagtgtccaactagaaacctttcctaatattgcccccaccaccactggtgagttggatgtgctcctttactcaagagttcccacagcaactggtggctggcctcctcttccctattattccttataccttagtgttacagctggagaatacctctgtctcattatcagactaggcactcttccaaaatgaggattaggtcttataaatagctgtatctctagggcttagtataggacctaccaacctcaaataggtaagtagtacctatttgccttcattcctcagggaatactggttgaatgaataaatgtcctcatttaggatgtattctggcaggaagacaatggagatgcaagtggactacttttcttgccccaagccacatggccaggatcctacatctttgttgcttgactgcctctcatttcataattcaagagttgccagctttcttattgatactgaccttttttttttttttttttgagatggagtttccctctcgttgcccaggctggagtgcaatggcgcaatctcggctcactgcaacctccacctcccaggttcaagcaattctcctgcctcagcctccctagtagctgggattacaggcgtgcagcaccacgcctggctaattttgtggttttagtagagaggggtttctccatgttggtcaggctggtctcgaactcccgacctcaggtgatcctcccgccttggcctcccaaagtgctgggattacaggcgtgagccactgcgcccggcctgattctgacctttttattccacacatctcaactgttgctgagctgtttcattctaggaggcaaagagcttttctggttgttcctgagatcaccagcctgaatctcctttcttgagcacccagcagtttcttttccaagggtatcggaatcttgaaagggcagcagattcttaggcatgggcggggagagctgctagaagacatcactgtcaaagaattggcaaagtcaagaatgtgccagcatccaagggtcaaaacgtcaggtgggacatcctgttccacagcatgatagccccagagggggtgccaaaaggatgacaaaagccttgtgagtgcccaggaatcaagtagagattaggaccaacccatcagagtgcaattaagcaaaagggggaatcaatttaaaggtgccagaacaggaaccatgcaaccaggcttcaggagaaagtaggaacgagggtcctgaacttcattcatcagggtcctctctctctcttttttaagacaaggtgacactctgtcacccaggctggagtgcagtggcacgatcttggctcattgctgcctcagcctctcaggtgttcctcacctcagcctccctagtagctgagactgcaggcacacaccactatgcccagctaatttttgtttgtagagacagcattttgccatgttgcataggctgacttcaaactcctaggctcaaatgatccagccgcctcaggctcccaaagtgttaggcttacaggtgtgagccatctggcgggagggacttctatctcttatctcttctcttcctccacccactttctcctatatcctcccccacttccaggtttctctggcccttccaacagcaagtatcgccaggagcagctccctaatctacatactacagatctatccacaagaagacagatggaaccactcttttcttctgaattctagaaccttaaggaagttaacctgagtggctcagcttggatcaagtgcccatcctggtccaaacaactgtagcagcacatctgtgtatttgtgtatcttgttcctccataatcttgcagtccggggaaagtgtgcagatggatgggtccctgaaaagcaagagttgtttagacaacgctagaggtgttcagttctgggagacaagagttgggccaggttgataactagcctaagagagtcggaatcagatgaataagaactagatcttgggtgacaacctagatcaagagtcttgaggttcagtcatttcaaaaagctcaagtctcattgcttcttggccttctggctaagatcatgtgcagtatctgttcttaccagtttaatatctgatacatcctctatctgaggataatataataaatagatttttggagcaaggagatggaataggagcttgctctgtccactctacacattggcctggattgcagtacctccaggaatggtgcaccctctctaccacccccaaaaagcccaagtctcaagaggtagtctggaaaaaagtgtttttggatttacctacatttttttttccaagatggagtctcgctctgtcacccaggctggagtgcagtggcgccatcttggctcactgtaacctctgcctccaggattcaagcagttctcctgcctcagtctcccaagtagctgggattacaggtgtgtgccaaccatgctcagctaatttttctatttttagtagagacagggtttcaccatgttggccaggcaggtctcaaagtcctgacctcaggtgatctgcctgccttggcctcccgaagtgctaagattacaggcgtgagccactgcgcccggcctaatttttgtaattttagtagagacgagttttcaccatgttgaccaggctggtctcgaactcctgacctcaggtgatccacccccgccctcggcctcccaaagtgctggcactacaggcatgagccaccgctcctggccgggtttgcctacattttggagatgctgcacaccatgtccctcttttcaagagtcacgtaagtatttacatatggaagaccctgagaaggcacctgggaaaaaacctgtttaactgtaaatataataatgtatgtatttgtatgtggagctcttcttttagtggattatctataaaccgtccactgttcccaatgcatactttggagacagacctacactaccagttttcacctgctagttatttttataagggttgggatggtccatgagtgaacagtcttgatttaaagcagtgtttcccaaacctcatttatttgcctatagccttcctggagtttgtcttatatgtccgctctgtgcactattcctatatgtttttatgtaaatcaatcacttttttaaaaagcctcatcccagttatatccttaaaacaatggttattttttctcatacacatcgaaatacatatctattagaattaaaatgcttgtccatgcactatcaataatctcctcaagtaccatatggtggggacatgtgtttgaagtgttaggagtcaggagtggtctctgtaagacagagtaagtcagtcaacctctgagcactgccagccacacatgctggcagagaagttcagcctgtgacaagactgcccggatatttccatgtctgtgcacggggatgtcctcggtctgccattgtgaagtctgtgctgttttcatgcctacctagtcttctttggaggggcctggaaagcaaatgcaggctgggtacagtggctcatgcctgtaatcccagcactttgggaggcaaaggtgggcagatcacgaggtcaggagtttgagaccagcctgaccaacatagtgaaaccttgtctctactaaaattgcaaaaattagctgggtgtggtggtacgtggctgtaatcccagctacccgggaggctgaggcaggataattgcttgaacccaggaggcggaggttgcagtaagcccagatggcaccactgcactccagcctgggtgacagagactccatctcaaaaaaaaaaaaaaaaagaaaaaaaagcaaatgcagattctccctgggaaacggggggttgggagagtggagtagtgtggatgcattgttattcctgaaggccgtcctcaaattatcttggactcactgcagcaagcagatgcctcatcttctggccagggattgatcctgagatgggaagagtatgagaagagacaccaacagcaaggcaaaactggctctggcagcttgcttcagagaaagagtatagctttggagtcaggccgacctgagtatgaatccaagactcagcacttactaggtgcctgccctcaaaccattattttttgatagtcattacatacccacaatgatcaccatggagtggatgaggaaacagggactcagagaagttaaacaacttgcctgatatcacacaggtaacaaacagcagagcagaattcaaacctaagttgatttgacttccaaatgtgtgctcctaaccaaagcagggtaacctgctttgatttgcccatttcttgagcacctcttctgtaggagggcctgttgctgggtgctgggaattcagtggtaggcaagatggacaagattcccccctctcacagaccttgcttgctataggggaaatagacaggaaaccaattactacatttgtaacttaataacaagtgtcataagtgttacaaaggagatagatactataaggcaccttttatttttatttgtttatttattttttgagactcactcgctctgttgcccaggctggggtacagtggtgcggtctcggctcactgcaacctctgcctcccaggttcaagcgattctcctgcctcagcctcccgagtagctgggattacaggtgtgaaccaccacactctgctaatttttgtatttttagtagagacagggtttcaccatgttggccaggctgttgttgaactcctgacctcaagtgattgatccacattgacctcccaaagtgctgtgattacaggcgttagccaccgcgcctggcctataaggcacccttggtcagccagtggaagcagggtcagtagtgcgccggagagtcactttgaaaaagtgatatttaggttgatcttgaagcattcacaagatgtggtaaacacatctaatggtaaacatgtgatggtaaacattagatgtgataaagatactgatggtccactggatgaacagttttcatatttacttccaaatgatttcatagatattatttcacagataacacttaggatgaaggtaaataaaaaggagatcaattaaaatatgaaataataatagtgaaagtggtaatagatgtggcaatatccacaaaggagtaatggttagattagcatattgagaagatcactttggcaattgttggaatgcagtttacgagagggccaagaatggaagcagcaatccctgttagaagtgtagtgttttggagtgcggtgttttttgttggtttgttttttgttttttttaaaccaggtctcactctgttgcccaggctggagtgcagtgcagcctcgacctcctcctcgggctcaggtgatcctcccacctcagcctcccgagtagccgggactacaggcacatgccaccacaccccgccagtttttgtatttttttgtagagtcagggttctgccatgttgcccaggctggtcttgaactcctgggttcaagtgatctgccagcctcggcctcccaaagtgctaagattacaagtgtgagacaccacccccagccagcacattgtattaatccaagcaggagaacgcagacttcaaaggcttatgggcagcagagagaagtagatgaagcaaagagatgcaatcagcgggactagtgggaaatgagggaaaggaaggtgtcaggatggggctttttctagctgagtggagttcagttcattcccagagaagcttgagaggtatccaactatagatgcaaggtagctggctgttggtcccttgtctttaggacagtttgacttttgtaatacaggcgacctcacagagctattgtgagaattcagagctgggcacagaatagatgctctataaacggtagttctattccccatttgccccgtcctcccagcatgccagggatacaggggcggatagagacaggttcagttccctttggtctcttgcattcccccttccctcagcacaattcctgggctcatagcggatgctcaataagtatttgtagaatgaaccaaagaaatcagacccttggtgacccagggctacatgtactcggcggaaaactggggttaaaccggacccttggttggttgaaaaattaaaataatttttaaaaagtgggcgtgaaataatccagaagttggagggcctggacaaaggctggggaggggactcctcccaccaggcggcctcagggtcggcttagcaagaaaggaggcgctggggagacctctggggtcccagctgccaaggtactcgccgctccaaggagatgcggacgccggataccagctctgcccaagattgctgggtcccgccgcggcctttaaaggcccaccacgtggctgcgcggccagccctggtccggaggcggtgcccgggtggcgcctgcgcactgcctagcagaggggctggggttccgagaaaaagcgtctggagaggaaggggaggctgcttggggtgggacgccgtgggaggagtcggctccttatgcaaatcacagcggagcgcgcacggtccggaggcggggcttgcgatgcaaagacaggtccgtctggcgaacagcgagggggcgggccgcaaccctctgcctctttccgcgagcgctgacgtcgccgacgtgttgtttaaaagcggccgcgcaggcgcagtgagcccaaatgcgaacttaggctgttacacaactgctggggtctgttctcgccgcccgcccggcagtcaggcagcgtcgccgccgtggtagcagcctcagccgtttctggagtctcgggcccacagtcaccgccgcttacctgcgcctcctcgagcctccggagtccccgtccgcccgcacaggccggttcgccgtctgcgtctcccccacgccgcctcgcctgccgccgcgctcgtccctccgggccgacatgagtggggaccacctccacaacgattcccaggtacggcccggcctgaccctggcggccccggaccccggcctggccgtcccgcgacccccggcgcaggccccgaccccagccccggcccggcagctttgacaggccggagcccccggtgaggggccgcctgccggagtagatcggctcgctaggccgcgagcgagggccgcgaagttacagttcgaggcagggatggctgccctctgtggccacccccgggtccccgtcctccccgggggcgcagggtgagccagaccccggccgcgcgcgctcgccgccggaggggttaaagtggctgttgtttgatattctctccttttctttttccagatcgaagcggatttccgattgaatggtgagtgtgccccctgcgccgactccggggccccccagccgccggccgcctcccccgcgccctgccggtgccgggcagaggacagacatggcgtcccagagactaagtcccggctcctcgctcaccggccccattgttcccatcgggccgcctcttgaccccctttccggggaccccagctcctccagatcccggccctcccaagaggggacaacggagaccccgtgtcgtccgccaccgggcctcgggcggtctttccgggccgggattcctcccgggaaagtcgccttgtcgacggtcgggacttagtctctgcgccattttctttttctctctcctctcctttctgtgcctgtgtctctttctctccctccctcggctctttccttgagctgcccagaatgagctttctgcagagcaaagccgtataaatcacatacttcaccagagagggaaggctgggggactgaattattattttttaaactttattttgggggttattccctttatgcttcatgtttgtttccttttctgcttccagaatgaaagatttccttaagcaactgttaattttttttttgataggctgtttatgataggaattatggctctaaaactaaagccacgctttgtggagttctttatatttccaggttgtttttcccaagttacgttctttgcaaaggtagcagtacctccctaaagaaagtttgcaagttctctgtgggtcacccaatgtaaatgttggatttttaaaaaattatgttagtcactggaacttttcattgtggtcgaggttcccaatgcagtgtttttctggaaacgcagtttagtgtacttgttggaaggaaagattgttgagcatctcttgtggacctggtgtgttggccttttcgtttgggttgtaaggaggaaaaaaagattttatttattgaagcaaagagtgtccagtacccacccctgcttcctgttcattctttttcacgagccactgtttttcaggaatcaagaactggctttttttttttttcccaattctttatgtttttgaacccttttcagccaaatcaaggcatttattcttactgtatttccacttcagttacccagggaagagtcctccaataaaaagctcatccttgcaggctttcgaacaaccctgttgaaggagaagttaccttctgtagtgtgctgggaattcccactgattttgatggtacataatcctgctcaattgagtttgggttccgggaacctctccaatgggagaagttgatgagtaggttttctaatgttgtaatcagcagtccatcatgttagcctgctctactgagagcaaccttatgttcagagtttgaagtggggcatccagcaggagatggtactcagccaggagagaatctggtttaaagtatggcatttcttgagcaccagatatgtgccaaccactgtgcttggtgctagagctgatcctgtaaccataacactcccttgctctcaattcagtctattgggggagacataattagttaattataaggtaactactggggcatatgtgtacccaaaatgctttgaagtataggggagttaattttgtctgagggtggggaaatttctcagaggaggtgacttctgagctgggggttgtggaagactgggcgcagagaattgtcaggggttggagtgtttcttaagtacgtttaaccaacctatcacgattttaaaagagggaggaggtgaggcctgcagtttagaaagccacagtatagacatgtttctttgggatacaggagcaaagaaaggatgtgcaggtgaggatgtaagaagtccttttgaccttgctagaggaaggtgggatctttaatatggaatgtgttcttttggctgtcaggctgggctgagtaggtaatgtaagtaatgaaacaaagtttagccctttcttgtgagaaagttaacttacatggttctcacctaagtcacgtgaatgattgtgagctggctaggttattgatctttactgacatttttatagaggctgaagtaatctgcgtatgttgacttttagaatgtgttggctcacatttaatagcaataatagctaatatttattgaatacttactgccaggcatgaatctcagctctttccatggatcatctaattaaatgtaatccttggaaggacccttgtgagttaggtcctgttatttctgttttgtagatgaggaaactgaggcttcagtgtatttactagcttgcccaagggctgtgagttggccactctaaatcccatgagctgagccactatgctagagtgatactatatgatactagcatgaaaaaataaaaagccacaaatctctattttcttacagagctgaaaaaggagagaaggaaggatttgataatttgtcatttgctttttatctaaacatgctttttgaagagaatctgccaccataaagttctgacattggtgtaattattctttgtgaatattgtctggaagatgtggtgttggtaactatgcttgctatctcaagtaatacattgttaaccagtgattgatttatgtaactatgaaaaaaactttaaaaaaagtagaaatcaatgtttaattatgcccagacatgtcattattgaactttgtattaagagattgtttaagcgtgattttaagagggcctaacccatcttacagattaactgtacaagttcatatattaaaatcaaacgtctctcattttgcctgccctcatcccctaagatataaaagattcccccccgtccccccactttggagctcattcttcgcaatatttaaaattgtagctctttgcatgtaatttagaacattctgacccatactcaactgctgggagactctgttatttatatttaaaatgttgacagtgagttaggaatttggagcagaaaccatatctaagtctaagtgaaaagacttcctaagtattggtagaactaactgtagtggggctgagtcattattacagtactgtacaggctgcgtagctatctgtagaattgataatggtaataccaggttaaagtgttagcgattcttctgctgtttcagaggtcttgaagtttttgcctgtctgctatggagatagggagttctcccccatttgacccccttagcaaagcacaatacttggctccatcagtctttagtctaagaagtgatatataggatcatggtttgacatcatcttgtgctgattctggttggcttaatggaatcaaattggatgaaggtaattaaatatgaattgtttctgatgctaatagatagttgtacttctgtctgttgggtatgggttgggatgggcggtagcatagctgattgcggtgggggaatttcagatagctgatgatgtggctatctgaaaattgccactacatttttaaaactgaaaagtgatggtaccgccaaatgaaatctgcagcatcctcagactcaatcaggaaatacttaagcattatgctccagggtggttttcttcccttacattgcaactggactccttgaggcacctttttagaattagtgagccgctaggatttttatactatgctttgacataaaagaaagttgcttgtcaatatgtgtttttttagtttaccagcatatcagatctcacaaacaaattttaggctcggattggatgtttctagtaaaaacaagaaaatccaggcatcactaaaagaatcagaaatacgttgtggcttgaaaggtgcaaactaaataatatagctagcagtaacggtcaccaactcctgcttttctttggttcagtagatagagtaaaatggaaaataggaaaccaaggtcagtccccaaatctcattttaaccaatagcagcaaaaaaaaaaaaaaaaaaaaggaattgagtctgactttttccccttgctgtcagcataaagatggggaattgagagagttggaaagacattcattagtttgttcagattattaaataacatgtcttaaagtttatattccaaaattgggctgtgaggtttttttgttttgcttgttttcagtgcatgtgtggggtggggaggtgcaaaaaaatgtttgccttctaatatacagctttgttgtatattaattatatagtaacagttgtccctgctgctaatggtatggaaaatgattctgttgtgctttctgaatacatatcattttagaagtttcagattatactaaaaccatgttatttcatattagttggacatgaatgcatatttatatgacacatcattatcaacttttgccttttgccatctttttagtgcaaagtaaaactgatattcttcaaatccaaagtcgtttcctcagaagtgtgttttgtgagggattgcatctttcccatgtgaaactgtgtcgaactccagtaaactgtgtttgcttgggaaaatgaattcaaatgtaattagtttgaatgaagctgtggaaatgtttgaaatgagtattttgacattggacctggaggtttaaaaaaaaaaaccctattgaaagaatagtaaaatatattggatgtggaggtgagagtcagttgagtgaattttctgtgttgtatggtttagattatctgactatcccttaattattttgaaaccattaactttggataataagggcatttaggcaaacagttgacacatggatttcttaaggtaaaaagtttagagacttccaaactagtccttaagaggcgaatgggtattgtgtttaaaggaagctttcagattgtgtttaaacttcgagtagtaatatttggaactgtcttttctccctatttccatgcctcatacatctcaagtttgagcagcagctttccatccccatggctccaggccaatagctgcagtagaaaatctaaaatagaggccagggttggaataattagcattttgccaacccccaccctccctgccacctgcctatctagatgtggacagtatgtgctgtgttgatagcatagggcctgggaagggtggagagggatgtaaatgagggcagggtggacaaagtttgattgggggttgcggggaagcttgtagaggaatgtctgttagatattgatggtattttggtggcgttatgagaaatggctgatagtttgctgaaatgatttaatagtaaatagatattgttgaacattttctgtgtgtataggaaagatcctagatatttttcacactgggagagaagtgatgttactggtatctcatgcatatctctggagtatatagatcgtaatatcaactttggctatctgtatcgaagtttgtattaactgtctttatgtgtgtcatttatgtctcttaacgtttagtaagaaagaaattccaaggaaggtaggcaacttttaattttaacttctttcctttactttttttttgggcggggtggggggcagacagggtttctgtttgttgcccgggctggagcgcagtagtgtgattgcagctcactgcaacctctgcctcctgggctcaagcgatcctcctacctcaccctcccaagtagctggaactacaggtgcatgtcaccacgccgggctaatttttgcattttttgtagagacgaggtttctcgccatgttgcccaggctggtcttgaacccctgggctcaagcagcctgcccacctcagcctctcaaagtgctgggcatgagccactgtgcctgacccttaatttctttttggtaggtattcatttttcatttgttgtcttaagcttctagtttcactcacttacctgtctgctaaatttttctgaaatgtgtaataaatgttttaatttaccatctcccttctacccttcccatcagatttggggtggggaggcatctctaccaggcaattaattcccctctgagcctttgaaattaacatttttgtttctgtggattcaaggagcctaaagaacacagttcattagcattcctaagaaacacctaggtaagctccaacaaaagatgttaaagcaatcagtatttttagggacttcagatctcctgtatttgttgttgtaaatgatgatgttgggaaaagaatttaacagatccctgggtattctgacgttttcctatattttaagaacgaaaccgacccagccagcttgtggtcccattattctttatattgtttttcttagcacacgctagcaaagatagatgcctaggacttttcttggctattggagtttatagaaaaaaagttctttgttgaaggttagtcctccaccagaataatacaccctttttccccttagtagaagtccaaatgttaatcttgctatcatatatgtatgaatgcccagatttataaagctttgtaggtatattactgattgtgcaggagactaatctaggaggcttcaggatcattgtcatttgtggatctcattggctaagaccttttacttaacctgactccagtaaggtagcccctttgtttccttgtagttgactatgtgagctcttgccaagcagcagaagtgggatgaagggaactaattttgaaaacttattaggcaccacatttttatgtgcattaaatctgaattgaataaagataatatagattgcataggcttatggggagaaccagagaccaggaaaggaaacgtttttttctttttaccctttatgccttttcatgtcccctttttgataacatgctgccttggtccagattctggaaaccccactcaggctgtaattggtaagcttctagtacagatgtcagaacctgcccttgattatctgctgttagagatagcttggaccctttgtatgtggaatgttaggtctaggggaagagtgggggtgtgaggagacagctgtggtaaaatagaaaattggtgtaggattccgaaaaatcgagataagtccctgttcttcctatgaaacatgatctgaccactgaaccttgttttcttatccataagcaaggataatatttatgtttcacaaactgttgagaattagataagtatatgaaggtgcctctctgtcctcattgtaaaatgtaaactttgatgagacagcctctattctcaactggatctttattttgaatgttaggtttgaaatagtgattgatgttggggagtctgtctttcattggtattccctgttaaagttttaaatcttcttgacatttacacagtgaattgtaacatgtaactagtgttgttgagtctttacctaattgaatcagcagagcctacactgatgtcttccagttacaaagcggtcactgtaaagtaaaaggtgtcttcatatctaggtttgggctgagaaggatccaattgtatatctagttcctacttttcttttttttttttttttgagatggagtctcactctgttacccaggctggagtgcagtggcgcaatctcggctcactgcaagctccgcctcccaggttcacgccattctcctgccttagcctcctaagttgctgggactacaggcgcccgccaccacgcctggctaattttttgtatttttagtagatacagggtttcaccgtgttagccaggatggtctcgatctcctgacctcgtgatccaccagcctcggcctcccaaagtgctgggattacatgcatgagccaccgcgccaagcctaattcctacttttctaagaatgtttacagcaaagtggtcattgccaaaggaacttgtagcagtacagaagatgggctcagaaatgaaagaagtctattgatgtgactaatttctcaaccatttaatagaattatggattttctattaaaaataacttgacccttttcgatgcatttaataaaatgccaagttcattatttgttaattttttaaaaccacaaaattcaatatgtcttgtgtcagcatattttttcaaaggccactattttacttctcccccaaaacgtttttaaattaaacagagaactctcaaagcacctgagaattacttcagtttttcatttattcaaatagttgcttaaagtgaccaacttggttttctttgaaatagtaattcttgggaataagaataccttaaataatataataaagcttatgtgtgagaatttagtaccaaatgccgtgttaacagttatgcgtgagtataggcatttgggagattccatgaaaaaatttgataaagtcagtagaaatttcagtaatggctcataagtctagctaatgctgaatattgaattgccttgaatttgtttttttggaagtgttacttaaaggaaataaacaaaagtcatttaaggatgtgttcactagtgttcattaggtttaagccaaatggatcttagtagagatcttacgccattcagcaaaaggattatcacagaagcatcacaacaggcgcagacttaaattcaattaaaagtaggcaggaggacataattttgttgtatagaaattatggaatagggcctaattttaaagagtcttcaaagataaacatatcaggaaaaatatagctcataaaatatggggaaaaaaatctgggaagatgagtatttgttaatgctctgtagctccattgccctcagtatacaaggaatgtgcccacaatagggttggatttaaaagtcttcaaagctttggtctctttttctttcgttttcctctgatacagaatgcgaatagtctcccggcctccaaccccctctacatccccaccaccccataatagagacttaaagggaatttaaattcgagttcttgagcttctgctcaatggctaggtctttgaacaagttaatatcagagccttagttcttcacctataaagtaggtttaatacttaccttacaacattgaggattaaagagcatgagaggattactttatgaaaggtgaagcttagaacagaatttttagttccttgccaatgctaaaaaacaacaacaacaacacctttttcagaaattgctttattaggcttttgtacaaagggaacatctttactttctttaaatttgcacatatatctattgtgaaattttaaccaagctggaggggtcactagggagcattgagtatgatactattgctgtaaatcatagaaaggctggctcaggagggtactgacttgctttgactttgcggcaacttcagttgtccagtgacaaggcttgctgcatacacaccactttgtttgtttctcataccttaaattgtggattaaaaatctttggggcaggcctggaggctcatgcctataatcccagcactttgggaggccgagatgggcagatcacttgagcccaggagttcaagatcagcctgggcaacatgggaaaaacctgtctcaacaaaaaaaatacaaaaattagccaggtgtgttggtgcatgcctgtagtcccagctacttagaaggctgaggtggaaggattgcttaagccccgggaggtggaggttgcagtgagccgtgagcatgccactgtacctaccccgttttgggcaacagagtgagaccctgtctcaaaaaaaaaaaaaaatcatcatcatctttggcagtgattaactttctcctttcacacttgggatggtgcaatatttggcatctacttaggaagctaaaattttcacgtttaattgtaaatggaaaagtttaagttgccatattcattcatacaaacattcagaaagtgaatattgtgactagacacagatgaacaagacaaacccacatgcctatcaggatgaactttgaaattagtacgttgtaggtatatacagtcacttcctctgttgagatttttcattaggcctcagtacaaaggctgctgtcatacaacatgaatggggactggaggtactttctggcagttaatatttcactatcagtgcaagagagtgacgtctccatttagtcctaatcgtgagtttttccccccttaaagaaattggagacctaggaccttggatttccaaagatttccaaactcttatttcttaaaatgttacaaaaaatggtttttttttgtatacctatatacccattaaacttttttgcctgaaataggcaaaaagatttaagttctgtgtatttatttcctgttatctttttgtatcagacatccatgttgcatgaattttagaaaaatagttttcagctgggcttggtaatggctcatgcctgtaattccaccattttaggaggccgaggcgggcggatcacgaggtcaggagatcgagaccatcctggctaacacggcgaaaccccgtctctactaaaaatacaaaaaactagccgggcgtggtggcgggcgcctgtagtccagctacttgggaggctgaggcaggagaatggcatgaacccaggaggcggagcttgcagtgagccgagattgcgccactgcactccagcctgggcgtcagagcgagactccatctcaaaaaaaaaagaaaaatagttttcacatttcctgagcaggtaggttgtcggaatggctagagatggtcacattctgtgtgagaaatcatgtgacaatagctaattcaagtatttgaaataatttaaatccttgaactgaattgattgaaataaagtatttaaaatcaccatcttcacatatttgaagaactaaaatcttagagaataaactctacttaaagtcctgggaaactaattttatgaaactattgaaatattattgccccttcctaatccatgaagtatcttgatatgggtaatacataaaagctgttaaagctcttcagagaaagatgcagagtacatagtggtattacttacagtggtttgaatactagaaaagtgatcgggacaaaatgttagacttactgtgccttaatcatacagtcagtgcatttttgcaggaatggatgcaatgtaagtagttcttactatttaataccagaaatgaagaaacagtagcttcttaggaattgattgtggctcaggatctatttcttaatttttaatgcttccacttaaccaggagaggaaagggaggagaaggaacacaaatttgttagtctttataactactggcttgttacacttgatttccaaaccacaagtgctccagggccaggcaccccacactgagaagtccctaagaagtgcatttattggaaatttgatttttaaaaaaaacctcatctctactaaaaatacaaaagattagctgggcctggtggcgcatgcctgtagtcctagatactcaggaggctgaagcaggagaatcacttgaacctgggaggcagaggttgcaatgagccgagatggcaccactgcacttcagcctgggagacagcgaggcatcgtctcaaaaaaaaaaaaaaaaaaaaagaccatgttaggttctgtttaagtagtatttcttataccctggaatgaatgaatgcctcttagtctttagaatttcataaggtttagctaggtatactcaatacttctccattttactacatatttttaggaaggcactaggtattgtgaactccttgagagttctaaacatctcagagcctgtttgagtattgatggcatagtcacagatactccatttcctttctagggaagtctgcctgcattaccacgtaaccccaagccagaagtgtaaccacttttctctgacttgcattgagcttttgttatcctcttttaatatttcattctgtagtagtctgtatttatgtgttttccttattaagaagtggccagcactttgggaggccaaagtgggtgaattgctttagcccaggagttctaaagcagcctgggcaacatgtcgggaccccgtctctacaaaaaaataacaaaaattagccaagcatggtggtgtgcacctacagtcccagctacttgggaggctgaggaaggaggatcagttgagcctaggaggttgaggctgcagggagccatgtttgccctactgtgccccagaacgagaccctgtctcaaaaaaaaaaaaaaaaaaaaaattaagagcactgtttcatcctgtatggtcaatacagatgcttttaccaaatgtttcagttgtgaagtgcaaactcctttctccccccagctggttgaagatcaagtgggagacttttgagagcttaacagtaagttttccttgtttttctcaagctgatatgcctaaaagtcacctggggatgattggtgaaaatacatattcctactcgtacaccttgaagttgattctatagtggaaggtactgaaaatctgcatttttaatgtatcttcaacaatcccaaatgattctgactaatgcaggtgacccataacctcctttggagaagttgatctatctgaactttactatcttatttggctaaagatctatattttgcttcattcaattacgatactccacaggttaaggtataaagcttacagggtgatgatgatgatgatgatgattattattattattatttggagacagagtctccctttgtcgcccaggctggggtgcagtgacacgatctgggcttgctgcaacccccacctcctgggttcaagcgattctcctgcctcatcctcctgagtacctgggattacaggcacaccaccaccacacctggctaatttttgtatttttagtggagacggagttttgccatgttggccacgatggtcccaaacttctggcctcaagtgatccggctgcctcagcctcccaaagtgcttagattacagtagtgagccaccgtgcccagccaagattacaggatatttttaaaggaccagaacagtattttttaatatatgtttataaaagcttgatacttcactctaagttatagtttctacctttcagtgagcatttaccaaatagcagatatagttaactgcctttgcagctgttttactgtgtgtcagaatcctaatcctttctcctacttcagtgtttaacaagccatttaattctgatgttactttttcggattgggtgacaagcagagcacaatgagcagggtttgttttcatactaatactaggatggttaaatcaggactttagaaagtaagtggaataatttagtggaatactgaaaatccagtctgtggagctcactgcctttagattaaattagttggggacttcagctcctgatggtactgattgaaatggaagcatttgaataaagcagtatagttgacgcttgaacaacacgagggttagggatgctgactcctatgcagtcaaaaattcgagttataacttttgactcctcgaaaacttaactaatagcctactgttgaccagaagccttactgataacagaaacagtcaattaacacacattttgtatgttatatgtattatatactatgatctcacaataaagtaagctagagaaaaggaaatattaagaaaattgtaaggaagagaaaatatatttaccatttattaagtgaaaatggatcatcataaaagccttcatcctcattgtcttgttgagtaggctgagggggaagaggagagtttggtcttgctgtctcaggagtagcagaggagaaagaaaaccctcatgtaagtggactcaagcatttcaaacacatattgttcaggtgtcatctgtggttctcaatgtgtggtttcctgatcagcagaactgcattgtttgaaaacttgttggacatgcagattctcgggcctcacccatacctactgactcttaaactctgggagtagggtcttagccatttgggttttaatgagtgtctaccaggtgatcagatgtgcactgaagtttcagaaccaatagaatagagcaagataccagttttgtagtaattcaacctcttaagcagtattccttgttctttcacaaggaaccatgtatggagttcattacttgtgctttcttacagttgtgaagttggagtaattcataatcgggggaggatcttctggagtataaaaaaatttaaggagcagttatatgattaacaccagaaaggtttcttgtatttctactgaatatatgccacttcagtaggagaggtgtgttcagtcttattctttctacagctagtggcccagagaatggcctgcgcatttcaagccctgtcaatgagaattgtctagacaaagaaggtcccttggttgaattagtaataggatacatgaaacaatgtgtcagcacacttaaagtctttatggccagacaaagtatggtcttagtgtgtttggaggcccctgaccattggaaacaaaggcagtttaggctgagctgtggatccgcacgtaggccagaggtttgtagtcactctcactcttcccaggcattaagcgttccttaatggaagcaaaggaggacaagcctacaggaatgggcctgccctaattgagctggcctgagaagatacattttcaggttagacaagtcctttttcccttttaagttctgcctcttgggaaagaagatgcatttgtagtgcagggatgtccttgtgaaaatgtgacttgttatagagcagtatttgaaatgcaagtgcccagccgggcgtggtggctcacgcctgtaatcccagcactttgggaggccgaggcaggcggatcacctgaggtcgggagtttgagaccagcctgaccaacatggagaaaccccatctctactaaaaatacaaaattagccaggcgtggtggcagacacctgtaatcccagctactcgggaggctgaggcaggagaatcgcttgaaccctggaggcggaggttgcagtgagccaagatcatgccattgcactccagcagggcaacaagagcaaaactccttctcaaaaaaaagaaaaaaagaaatgcaattgcccatcttaagggtcttgtactagttaattactttcagagataagtaaaaaaattccagtgttgtcttctattaagagagcaaaggtagttagtaaaaatgggatttgtttgccctgctcccgaagcttaaaataattgctctatctcagttttgtcttatgcttcggcagactaataacttcagttgaaatgttttctgggcaggtgttcattgagggcctgattctccagaggttctgtgcagaagcaggctgctttgagatagccagcttagccaggcctgggaaccacacagaatagtgcagtaccatgtagggaaaagtccttgactgggctgcaataggcagagtggagagtgctaggaagcagagtattttcctggataatttcatccagtagaactttttgtcatgatggaaatgtcctatatttgtgctgtccaatatggtagctattagccatatgaggtgtgtctgtgtgtgtgtgagtgagagagagagagagagacaagagtcttgctctgtcattcaggctggagtgcagtggcgcgatctcagcttactgcagcctctgcctcccaggctcaggtgattcgaccctcagcctcccgatagctaggattacaggcgtgggccaccacgctcagccagtttttttgtatttagtagagacggggttttgccatgttgaccaggtttgtgtcaaactcctggcctctagtgattcacctgcctcagcctcccaaagtgctgggattacaagcatgagccactgcacctggcctatatgaggttttgagcccccttgaaatatgtggtaagtgggaccaaagaacttaattattttattttattttattttaatttaaatataaactagccaatagtggctaccatattggacagctctagataaaatttaggtaagacccaagagattgtggtttagattctgcttggaatatgagtgattggggctcttggaatttaaaaatccaaagacacgtgtgaatttgatgttatgagtttgaataacagccttccttcagtatgtctacattgttttatcctgactgacattgtaagtcctaagaggacttacaactggtaagtaaagttgtgtttaccaaagcagttggaagttcaggcagttgtacgttttatttgaccccttagagctaaacaggtgaaaatttcaggtcctttggatgaagtaagttctcattttatctcagcaaccctatgaggtaggttatgtctgttgcgtagttgacaaaacagatgaacttatatttatgtacacctttatggattagtagcctttaaaatggttagttttatcccacaacttcatttgaaattgtaagtttctagcatgttgcctataacaagaaggtaatttatttctatttgttaaattgttatcagtaataagtcaatatcctactataagtggtagagaatcaaagattgtagactaccaaatagcacccaagaggctaattcatgcaaggtgttgcttatagtaaaagcagatcagaactcagctgctgtatgccatctggggttatcttctcacttgcacgctcatgaccagtgtaggctgcatcttataagtaatctggctcacagttagctagacatatattagtctgatggaacaaaatccgattgtagctttgaccactatgaggaccactgtcatataaggtcttagataccaacttgagtaaattgcttaaggactgggaatagatccagattcctccaggtttagcttcaagttgtgatcagttttcgtgggatgcaaggagaaaatgaataggaatgaaataaatagctgatatttgaacatttttaatgccctaggcagcgtcttaagaattctaagctttcatttatcaatcctgaggtagttaacattactatttccagtaatgttcactgggccagtttacttttgaagaaattgaatctcacggtttaagtaaagtaactagctcaaggctatatagttataactaagccacagagcagggaggctaatctaggcctacctcatgccacagcctgagttcttagttgtgatacaaaacaaggtaaagggggacctggggtgacttagttgcctcctgagaattctgggctgtggtggaattacccatcagactgggggcgcccatctcttcacttatgatgtgtccttaacagactaaatgcaggctctgctgcactttaatgtaattctttccctattaagggaagcttgcttgcctttgcagcaaagccccctggatagtttattttttagcagttcagcttgtgcttggacccagttgttccagaaatcagtaaaacctatttgagtattcaagaaaaaggatctttttgttaactaaggattaactagaaaccttattttataagggttcctgaagtctgcttatttactaaggaatttcatcagaggtggttagcattttgtgaacaagtatgatgttgttcccacttcaaggggaataaataacaaatttaaccagcttgctgcttaagaagcagaattagcagtgggccagtcattggcctctcttcagagttctcatgtgactcacttagttttgcagagtgaggtagattttaaccactttcaagtcaagttgattggccattcatgagctgtgtgcagggagagaagagagacgagaacaagttagcagaaagctgaggtgtgttagacgggagttgtaggtaagtcagggaggatattcttcatttagaccctgagcttgagtaagacacctttctacaggagacattgcggatactttctagttagtactagcgcagtgttctgcaaactacacctgcttttgtgtggtccacgaactaagaatggttttgtatttttaaatttaggcatgtgccacataacaagatttctgtcaacaatagaccacttatataatgatggtcccataagatagaaggtggtatttttactgcctcttttctgtgttgcagatacgttcagatacacaaatacttaacactgtgttacagtttcctacagtactgtaacatgctgtacaggtttgtagcctaggagcaacaggctataccatatagcctaggcggtagtaggctataccatctaggtttgtgtaagcacactatgatgtttgcatgacaaaatcgcctaatgacacatttctcagaatgtagttggaggaaaaaaattgaaaggagagtattacttcatgacacaggaaaatcatttgaaatacaaattccagtgtccataaataaagttcactagaatgtggccatgctcattcatttacatgtaatctgtggtagtttttgtgctactgtggcagaattgaatacttgcagtggaacttgaatgggctacaaggtgtatttagtacctggcccttcacagaaaaagtttgctgacctgattgaatgtgcttgtgtgtatcacaggaagctcaccaggactcttggtatgtagcctctagctcccaaaggcatctgagccccactggcaggactcagttacctgtctctgtctaagcatgactccacccattagcgtccagacaacgaagaaaacttctattttaaagagcttgactaaccccctccttattatctaagttagagtagctgtgccaccccttaagtagcttttccttcttcctttcaaataggggttggaagagtagcaggtgagaacaacctctttcttcctcaattgtagagactcaatagtctaggctataaattaaaaaaaaaaaaaaaaaattccccagaggctgactcagcacatgcctgccttttaaaggaacagagagacccaattggaatagaaactgaaaataaaatcagcagcacatgaatttttgtaggtggctcgtatttgctattaatattgctcagaagactcaggaataagaaataataatgcagggtttcttcaaaatatggttctggacagtggattatagttacctggagagcttgtgttaaaatatctgaggatgattccaagtaccagggcttatacacaggaatacttgagaaccactgcactcaagcatttaaaattttccttttacctaaatccacatgggccaagacaatttttaaaattcatagaattcatgtgaccagacgtaaggggtcaataaaggtcattttatagatcagaaaactgagacccaaagctgagaaataagttatctaaaaccccaccaggacattgcattaaaggagttgctctaagcgtgtcttcttactattagaaagtgaaattgacttttaaatctgtcacttagtttttggcataataataaaacaatgaacagtctgttctggctctaattgcgcctagaatctccagatcagaagaccttcttgtagatcaagtaacatacttctctgaaagacagtttgtcggtcctatcactgaagtctgaattatttttttgatttttaaatataattaattggtccctggaaatgagaaccagaggaagataagaagatgaacttgaatttaaggaccataatggaaggagtgggatgggaaagaaggctgtaaaataagacagtggttgtggagagacagattaaggtaaggagagaaggttgtaaaataagacaggaaggggttgtggagagacagattaaggtaattgtggtgttgtaaagccataaaagaaatttaaatgcggaagtggcctggaagagaaaacattctctgatcatttaacccttttgtgtgtgtgtcagtttgaggcgtaaagtagacgaatagcctccttcttgtgtgtcttttccatggcaaagcctttaaggataatagctgaccactaatctcacacagctgctgatgtttaagaacctaattcttgaagtgtttttaagtcagtttgtggcatttcttctgaacacttgggcactttggaaattgtagtgacaggttttagaaatttgaagttgtgttgcagaggtgataacaaaattgggtctttgagcaactctgagtcttttaatgcagtgcacttctaagtttccgatggtatttccccaagttttgaatattgaaaagaaagaccacactttgcaaaataattggcaactttcatttaattcagtttgaccctgtcttgaacttggtctttgtaacttcttatgagggtcttttccaacggtaacattagaggctgattctggaacttcatggaggcaagtccagtgaaacttgggcagttagggggaccctttccctctcccttttcaaagttactcagtcagcagctgctactgttgggatggcgcggtcaggtgggtattatgcttattatgaaacttgatgagggcagggactcagttttggggctgagttgtatttcaacacttaagtggcactcagtaaatacttgaacaaatgaatattgtgaatcccaacttccttaaggacagaagaactatttatacttgtctgccatcttcttagctagagattttttttttgtttgttttgttagctttcaagttgaggtccctaacaggggaatcccatagtttcaatgatgaacaggtccatgacaaaaattcttgtttatatgcaatacacatttagggagaataaatggtcatgtggactttaaaaattggaaatgttactagtctcttctctcattcttttgttttgttttatgttgaggcagagtttcactcttgttgcttaggctggagtgcaatggcacgatcttggctcactgcaacctccgcctccgggttcaagtgattctcctgcctcagcctcccaagtagctgggattacaggtgtgcatcaccatgcccggctaatttttgtattttttagtagagatgggctttcaccgtgttggtcaggctggtcttgaactcctgaactcaggtgatccacctgccttggcctcccaaagtgctgggattacaggcatgagccactgctcccagccctcattcatcagttttttaagggtttctttagagctgaatcctcccagcagttttctttccttttgaattccagagctctttgggcctttagccagaaacagtctctgtcctgcttactttgaaaggctgttaactatgccctggaattttggaaatgttctccttgagaattgctgtaaagtagtgataaggactcttctgtaggctacaaattgaaaccagccaccattaagatggctcacagacagggtgtcctggattgaaactggaccaacgttggtatagtctgaatttgaggagtaaaaagaaatatgcccttccctctcccctaacagttggggaatacttgtttttactcctcaaccattccccttttaatgatgacaagttttcaggctttttcactgcctttagttttgcattaagttcctgggagattcacacacccctgatatttactgcactcctggatgccagttttttatcactcaagaccagcttgttatctgtcctagacagaagccatcttcttttaaaagtattagaacatactgggtatagagtgttaaagagaatgttgatttttttaaaacttctgcttttggggatgtgatatgggtttgaaagtcagggaggaagtagaagatgtaagggtttgccccagtacaagagttttaataatgaggtgataaatattttctttaaataatttattcacccattgtgttcactcaagtggttctagtgttcactttccttatgcgctagttgtatatttgtatgtcagagaagagcagagattatctttgacagaagttatattgtgagtgtctttttggagaaggtaggttttgattgtgtaactatgccacacctccattccccatacacttgacttgatgattatctttgaaggaggagcccatcatattatacagctgccctaagtctcaaatctatcatcaaaaggcagtgtaaaggggactggctcaaaacatggcaaagagtctcctttatatcagaaagctctctgcctttgcttataaggcagcaaaggactcttcttcctgccctgatctgattaccctaaaagctttaagatcatggaatagttgataaaacagtcagtattctgtgctgatgacttatccttttctcccttaagaaagagtaaatgtttttgcttggattgagtttagagacaccagatagaataagattggcaacactgttagccacctgctgaccacagctaaacaggcatatgtgcttctgcatggggaatgctatggcgttaacagtgccttccttaaaacctgtaagttcgttaggcttccgggtaccagggttgttagagtaggccacagtttacttcctttttcataagtgcttttctttcctggatctcagtataggaaggaaaatcagacagcatttctcagttgttggctcggtgggcattgtgaatgggtatggttgctgcctcaaatgcacatatacaacctgagctaagttgtatgaaatgattgagtaggctgacttcagttctatgtaaattaatcaaggagaaggtttaggaatggttgtaccgcattgacagttgttaacatgtttataatttcttggagattagccaggaattctgttacaactacacacaaatattgattgactttcaaaataaaattctttaaaatcactgaaattttctgagcccaagtttcttcatctgtaagataagcaaatttactaaggtcatgggtatctagtacatgatggacagagatttgaagctctttaccactgatttatgctaccttctcatagatctagtagttaagtgacttttacccaaggtcatacactgagtgatagaacaaggattttgaataagatatttttcactgttgcactggtctgctttctccagcttccttcagaggtccctaaaggggacctctgtgctgctctgcagtgcctctatcacattagggtttggtcatggtcttttgtgctcatcatgtttgaacatgtttatcaaagtattttacagacttggttatttcttcccctcatgtaatttgtgtatttgtctgttttccctatggagaatgaactttttatcttatatatgcctgatgtgacattgatttggccacttggggttgaccttgtacttggtttccatatctgcagcttcattgtcattttgggtttaggccagctttcaggaactttttaacagttggatcaaattttgttggattcatttgatactgagtttcttattcctgtatattttgtttcctttctatctaagcagagaactaggactctagagttacaagaagttagagtatatctataacttttttaaaagaaaaaaaaaggaccaggcatggtggctcactcctgtaatcccagcactttgggaggccaaggcaggtatatcacttgaggtcaggagttcgagaccagcctggtaaacatgctgaaaccctatctctacaaaaatacaaaaattagctggccatgatggtatgcacctgtaatcccagctactcgggagcctgaggcaggagaatctcttgaacctgggaggcggaggttgcagggagctgagattgcaccactgcactccagcctggacagtagagtgagactctgtctaaacaaacaacaaaaaaaaactctgttttggacacatgactttagggagataaacataactctgggattttattttttaatatgctcctgaaaacagtcaactctcccatttcctagctgggagaagtatgtctcacttaattttgctcattcaggagaggatgaatttttcagcaatgatagtaatagctggctgttgcaactcatttcttgctgcagcgtagcacatccaccaagaatgccctttcaccttcctttgtcttgccaactccctcttagctttcagtaagacttggctcaaactgcatcctccaggaagcctatgttaactcctaactgccactcttggatccagggtttttatttcatcttgttcgctggtggaaccgggctgttttatctcattatattactcttcactttgaaacaaggaggcagttaacctagattcagtatttttactcttagactttttttcccccaaaatgcccataaattaagcaatcttactgccttactgcgcttactgaaaaatagcagcacagcagaaaaatagaaaatcttgctatcatgtaagagatgtggaagtaatggtgcccacatgcttcatttggaaaatgtctattacctttataaagagtttgtatagtttctaaatacaggagcattatgatgcgatagaaactgttactttaatgttaattgacgttcgaaaatttgagtttcaaatgtttcctaaaacattttttcttaacccttttgctattccattgatctgccattctacattctgcctcctttgtttccctgtcacttattaaaaatactgcctcttaactttgttgtcatccacttatttctctagatacaccttggagtgttttttcaggctgaattgttaggcatgggattgctgggtttaaagagggagtgtgtgagtttgtttgattttgccaaattcttccttcatgggggttataccaactagatgcaccttattttcagagatggtaaaatgaggcaaaaagtatcttagatttgaggaaatcgttaccacccagagttgtgaaacttagaggtgatatatgtaatactgccttgcacaaaatatacatttagtaaaggatactgatatggtttggctgtgtccccacccaaatctcatgttgaattgtagctctcataatcttcctgtgttgtgggagggacccggtgggaggtgattgaatcacccgggcagttacctccatgctgttcttgtgatagtgagttctcatgaggtccgatggttttataaggggcttccccaccccgcccccgcacctgccccactttgcttcacacttctccttgctgccatcatttgaagaaggacgtgtttgcttccccttccaccatgattgtaagtttcctgaggccttcccagctctgcagaactgtgagtcaattaaacctctttataaattacccagtcttgggtatgtctttattagcagcgtgagaatggactaatacagatacctagatacccattattatcttttgtgaactgggactatttctctatcgtaagagtggtaagaaacttgagttgagatagtgtttgaaagcacgctagcatggtgctggcacccgtattagtgcccttttctcttgtgtgccttgggcagccagctacttgagattatatcttaattaccttaatggattgtaaactccttgagggcagagtccttgtctggtgagtctttagcaggaagctttggacttgaatatatttggttttaaattgaattagtcttcagaatatatttctgaaacagtaggaaaaggatttcttttttttctttcttttttttacacattagccctcaactcctgtgtaatgctacctaacatctattcctacagtaggaaaagacagagacactttccttttgtctgtcggaagcttctttacttaaaagctttttaaaccccagggaatacgttaggtaacaatagcaaaagatgttgattcctgttctatctgtttaacttatctgtccttagggagtaactccagttaaattacagtgaaaggagttagttgccataagtcttctgttttatcaagattgctttattgcagggggcttcctcccatgtcttcatctagaattttcactaggaattaaaatatttgttactagaaagcattagttggcctgaattcacagtgaattaggttttctgatgatttaatgtgcactggtttgcatctttcatatctgtcagttaaattcaacacatttctttttgcacttaacaggtgcttgaagtggcagggtccttcctctaaaacattttaaataacactagtagatgaattccagttaaggggaaaaggtatgtgctgaaagtaatcttcaaggccacagtatgttctctccaaacacatgttttcaccacgagggatgtagatctgtgtgcccttattggctttactttttcacttactggcatctcttctgaccaacatctttagtcagatgtcccactgttaccttagatacaatatggctcaggctggtccatcatttctccagtatttttcaccatctttattctgtacaagtttcttgtttttgccaaggccccttgttcccccagtcacctggacgtaaagactttctctgactctttattacactgcatttattacacatagtagtgagttcctggaactgggttctacttccattttcccaaatgtgcttttacattttttccttccttcttagttcctttgctgtcactttttttgtagattgcttcagaaacctctaactatttattttgcttttacttttatctcttactatgccttaacacaaaccctctcttggaactaggccagtcttcttgccatgccctcacataataacacaaaaatgaagggttggaaaggaagaagcttaaagataatgtttaacttatgaaaagtttcaagcatacacatagagaaatataatgaactcccatgtgtctgtcactcagcttcagtaattaccaaccttttgccagttgaattttgtctatccccgtatcccttggtgctcccccaaccaccaccaccagagagtattataagcaaattccaggcatcgcttacatggaagtacttcagtattcatctttagagattctttaatctgtcagtttacctactgcagaatatctctacagtttccctttcagttggttatttagtttgtttaaatgcttttggcgttcagaaggcatcccattcttttagtggttagttcttttgtactgacctcaatttgcctccctatcatttctcagcagtaatataaatttatatttactcagaaattacaaatttactgagtaaatttatataatacaatataatagtcattaagatatttgaagaagttgccatgtaatacactttttgacacacctttcacagcacacatagcacatgtaataacttttatttgtgttttagagagagggtcttgctctgtagcccaagtggagtgtggtgatgtaatcatagctccatccttgaactcctgtgcccaagcagtcttcccacctcaccctcagagcagccagtattacaggtgcaccaagatgcccaattaattttttaaacagttttcgtagagacaaggtcttgctatgttgcccaggctggtctcaaactcctggcctcaagtaagcctcccaccttggcctcccaaagtgttgggattgtaaacatgagccaccgtgctcagccattcctttaaaataggaatacttggggttcagatctttgacctaggtcttatttgtatcaatgagattaatgagccacagccccgagtttctcaccagacatttttgatttgcatttttagacagcagttgctttaaaaaacttggggacctggcttaaaatcaattttgaaattttgtgcattaaaaaaaaaatgtggccgggcgcagtggctcacgcctgtgatcccagcaccagactttgggaggctgaggcagatggattgcctgagctcaggagttcgagaccagcctcggcaacacggtgaaaccccatctctactaaaatacaaaaaattagccgggcatggcggcatgcacctgtagtctcagctactcgggaggctgaggcaggagaattgcttgaacccgggaggctgaggttgcagtgagccgagatcacaccactgcactccagcctgggtgacagagtgcacctgtagtctcagctactcaggaggctgaggcaggagaattgcttgaacccgggaggctgaggttgcagtgagccgagatcacaccactgcactccagcctgggtgacagagtgagactctgtctccaaaaaaaataaaaaaaaaaaagttattggcagactgttatctgaaacctgcctggaattactttcaatttatcctttacttaatttcctttttaagtttagagctttttagtgatttaagcaaattttcctatgtacactagtatttgtcaagataaatttttaaagcttggtccattttttactataaaagtaattgtggggaaaactagaaaacaagatgaagtatatgcacaaaaactcaagttactcataaattgactaccctaagataactgcttttaatattttgatgtctgtattccagtcttcttcatatgtatttatgcgtttgttgaattatacacagagtagttttttttaatgtgatgtcctttccatactctagggctgtattagcagatcttgatgttctgaagcttgtttattgcatctggcctgcaaacaaaattaattgacacacatgctttattccagattgtggtgctattacatgtattgtcattattatgattttagccataagtgtttggtttgaggcagaagtagtgggatattgctgtcaagtaaactggggccactaaccttgtgggaatcaacttagcattttaaaattatagactcgaggtttttagaagaagctgaagggttctgtatgctgcatggaagattgagttcaaatcctacttctgacaccatatgatattatttttcccatctctgtaggatgggaatttcttacagttagtactacggtcatgcagatttctattttcccagggcctgacacagaatagatgctcagcagattatgacacatgtggcttcttttgctgtgagccagtcatgggatgaagacacattgcctatgcattattaattgattgctataaaacatgttgcctcaaaatataatagcttaaaacaacagacacttattttctcatgtagttcctgtgagtcaggaatccagacatagtttatctgggtggctttggcttaccatctgtagattgcagtcagtatgtcagccagggctgcagtcatttgaaaacttaatttaggctagaaggtccacttccaggatggctcattcacatggctaattggcaggaagcttaagtttcttactacatgggcctttccagagggcttctgagtgagtacatgacagtgtgtcactggcctcccccagagcaaggagagagcaggaaggaagatctaataccttttatggcctagtgtcggaagttgccccctcacaattccacttcatcttgtttgttaggagtgagtcacagtgtccagcccacactcaaggggaggggaattaggctatacctcttgaaaagcggagtaacaaacaatcttatagtcaagattgtgtttgtgtaaggttagaatagagggtccggaaatagacctataattatatgaccgctcgaaaacgccaagacaatttaatggggaaagggccatcttttaaaaaataatgctaggctattcacagtagcagaaacatggaatcaacctcaattttcattaatggtagactggattaaaaaaaagaatgtggcgcatgtacaccacggaatactgtgcagccataagaagaacgagattgtgtcctttgcaggaacatggatggaactagaggccattacccttagcaaacgtaacagaggaacagaaaaccaagtattgcatgttctcacttataagtgggagctaaatgatgagaacacatggacacatgtaggggaacagcagatacaggggccttttggagggtggagggtgagaggagggagaaaatcaggaaacataattagtgggtactaggcttaattcctgggtgatgaaataatctgtacaacaaacctccatgacacgagtttacctatataacaaacctgcacatatacccctgaacttaaaagttaaaaaaaaatggtgttagaacaacttgacgtctttattgattagaaaaaaatgaacactggcccttaactctgcaaaactgctagaaaataaataaataaataaataaataaataaataaataaataaataaataaggtggtggtggtgatatgcccttgtaatcccagccattccaagggctgtggcaggaggattgcttgagcccaggagttcgagaggagcctgcgtaacatcgtgatataagaaaatgagactctttccctgcctttccctgcaaaagagagagagagaaaatctgtgtagcccttgagtaggcaacgatatcttggggcacaaaacatacagaccctaaaagagaaaattgatgaagtggacttgatcaaaatttaaaacttttgctctttgaaagacaccattaagaaataaaaacaagaaaatgatggggagaaaatattcacagttcgtatagctaacaaaaaattggtaatccagaatgtataaagagctcttacaactaggtagtaagaagaccaagaaagatttgagcagatacttcaccaaagaaggtatatgagaggccaacaagcacaccaaaagatgcttgtcattaaacatcatttaatcatcagaaatatgtgaattgaaaccacagtgaggtaccactccacacgtgctagaatggctaaaattaaagactgatagcagatattggtgaaaatttgtagcaattggaatgctaatgaatttttgatggagatatacaatggtacaatttggcaatttcctgtaaagttaaacatacattttttatattacccagtaacttttctcctaagtatgtacccaagagaaatgaaaacatgtctatagaaatatttgtatatgaatgtttgtagcagataaataataaccaatgcctggaaacaactaaattgtccagcaggtgaatgggtaagttacagtatatccacacaatgtaacaccactcagcaataaaatggaaccaacaactgatatatccaacaatgtggatgaatgtcacaaatgttatgctgagagaaagacatcagacacaaaaagaataaatcctatatgatgttatttacatgaaatctagaaatctagacaaatctaatatacagcacgatcagatcagtgcttcctttgggcaaggggtggaagatggggaatgactgggaaggagcacgagggaaactttctgagatgatggacttgttctaaatctttattgtagtggggattgcacctgtgggtgtctttgaaatgtttattattacagttatttcttaatatttgtaggggattggttccaggaccaccccaccccctgtccctagtataccaaaatttgcagatgttcaagtttttttgtatataaaatggcacagtatttgcatataacctacacaatccttatatatactttaactcaccaccacattacttagattacctaatacagtgtaactatataaatagttgttatattgtggggggatttgtatttttttggttgtattgttattactatttttatttttccttgaatattttcagtctgcaaatggttgaatctatggtgctgaacctgtagatatggagggctgattgtattttattgtttagacattacaccttattaacattcatttaaaaacatctgttgaggtttggatttttcagaagttataacatctgatctttagagtcagtgttcaatactatccctttgttatcatttataggtcaggcttaatagtattatgtctagggagaaaaacgccaaactgtggcttctttccacagaataattggctctcatttccttatcctccccatattagtaacttgtcttgattgtagaagcaggctaatgggagctttgtctgggcttctttgtgaaagctttttttttcagtggcatgtgctattatgcctaccatgccatttgaatcctgtcattgtacttcttgaccagcttgtcaaggtaggcatacagaagatagctcatgactcctgttaactgactcatctcttatggttgcagattctcataaacacaaagataaacacaaagatcgagaacaccggcacaaagaacacaagaaggagaaggaccgggaaaagtccaagcatagcaacaggtaagggtggaatcaagcaagtccctcatcattcagcagtgggttggccattgcttggcttacctggaataggtcttaacttgagctacatgtaaagatagcaaagtaagtagaaactgtatttgatcctagagttgctatgaggatggccatgatttaggccttaaatgggatgccattgttcagatcaagatgtataaagcaagtatgtttaattttcttttaatatatacctcattaaaaatacagttgttcactaagataggtaaggattcattgtgacacatgatggcatttaatcaagtctgtagcaagcttgccttgataaaaggtaactggattggagacctgattttttttcttctttctatattttaaagagtttacattaaaaattcttaacttgggcttccatggtctgttagcccctgaaattatatgcaaatggttgagtatatgagatttcctggagagactatttgtagctttcatcatgttatcagaggagttcggctcccacaaaagcctacaatcaccaatatgaatgaaactcaatagtgctgccttttgggatgcaagcctcaagaagatgtttcttttgttcattttgctcccatttttttggtgtaggaggcaagtggttaaatctagttattgaaaatgaggacttgtacttccattctgatttaaagacagttgttggtgagaaagccatatggtattcccattcccatagtggcctgagctaggttagggaatgtaaagatctgtcacacattagaacaagtgtctccattgtagagttcttagaacttctttattaacttgtctgattgtctgtagacaagttaaagtgagaattgctttctaagtctgttctttttcgcgaatcattaaaataaccagatttaattttctctattggggacatttctttgggaatcatgtatcatgcctgtggccttttttccctatccctcacttatctcttatcacttgatcatctagtttccattttcattattctggtaaatttaatctcagtagttgaatctactctacatcttttctagtttatagttgtctagcttatgttaatatctaccgtacagcaaagaatattgccaaggataaagaagttcattgcataatgataaaagggacccattaggagaacatagcagttataaatgtttatccactaacgtcacagcctcaaaatacatgaagtaaatctgatagagctgcaaagagaaataaacattcataattatggtcagagattttactatctttctcaataatttttagtccaaatagaaaataattaaggatatggaagacttgaacagtatcaaccaacttgatctaatcgacatttataggtttttcccatccaacaatattagaattttctcttttctttctgtctacttttccgcttttaatttttttcaggttttattttagattcagtgggtacatataggcaactttgttacctgggtatatagctgtgatgctgaggtttgggtacaaatgatcctgtcacccaggtactgagcatagaacccaacaattagtttttcaacccttaccgccctctctgctctagtagtctccagtgtctattattgccatctttatgtccatgagcacccgatgtttagctcctgcttaaaaatgagaccatgtggtatttggtattctgttcttgccttaatttgctcaggataatagcctccagttgcatccatgttgctacaaaggacatgattcagttctttttttatgaccgtatagtattccgtggtagatatgtacaacattttctttatccaatccatcattgctgggtacctaggttgattccatgtcttccctattgagaacagagctgcagtgaacatgtgtgtacatgtgtctttttagtaaaatgatttgttttcttttggatacataccaagtaatgggattgctggatcagaaggtagttgtttttttaagttctttgagaaatctccaaactgctttccctagtggctggactaatttacattctcatcaacagtgtataagtgttcccttttttctgcagccttgtgagccatctgctggtttttgatttttaatagccattgtggctggtgtgagatgatatctcattgtggttttgatttgcatttctctgatgattagggacgtggagcattttttcatacatttgttggccatttgtatgtcatcttttgagaaatgtctgttcatgtcttttgcttgttttttaatggggttacttgttttttgcttgttgaatcatttaggttccttatagattctggatattatacctgttagacgcatagttagtgaatattttctcccattctgtaagttgtctgttaactctgttgatagtttaattagatcccatttgtcaatttttgcttttgctgcaattgcttttggcatctttgctatgaaatctttgctcgttcctatgtccagaatggtattgcctaggttgtcgtctagggtttttaacagttttaagttttacatttaagtatttgattcatcttgaattgatttttgtatgtggtgtaaggaaggggtccagtttcagttttctgcgtatggctagccagttatcctagcatcatttattgaatagggagtcttttccccattgcttattttggttgactttcttgaagattagattgctgtcggtgtgtggttttatttctgggttctctgttctgttccatttggtctatgtgtctgtttttgtaccattaccatgctgttagtgtttctgtaccattaccatgatgttagaatacattctttttaagtgcacacgaaatgtgccaaaatagctcatactttggaccccactctccttaaaccatcttctttggctttaatgcttccatgcctctccatctttctggccacctttttcacctctttctaatgcacagtcattccttaacagtttttggctgtcttttctctgctacctgttttgctgtttatccttatttcacattccatatttggtcttgtgaacttcttttcagttccttaaacatagcatgttttctgatgccgctaagcctttaaacatgctgttggttctgtaatactctcttgcccctttgctgtcattcttttagttgcagctcagacttgacttgttccaggtatcctttctaccctccttctcatattaaatgccacttttgtgtgctctctggtgccttgaatatattcctagtgtaataattattatatttaattgtgtctttacttttccctatggcctcctggactctaaagtccctgaaagcagaattgggatcttttttgttttttctggggtggggcggggggctggttttttgtttgtttgtttgtttgttttttgagacggagtcttactctgttgcccaggctggagtgcagtggtgccatctcagctcactgctatctccacctcccaggttcaagtgattctcctgcctctgcctcccaagtagctgggattaaggtgcgtgccccgacacccagctaattttttgtatttttagtagagacagggtttcaccatgttgactaggctggtctcaaactcctgacctcaagtgatctgcccaccttggcctcccaaagtgctaggattacaggtgtgagccaccacgcccagccttttgtattcattttgcatccttcaggcttagtatggtacctggcagatagctggcacttactagtctatatttattgaattaatgagtggatgatctatgggtacattaattcccatctctctttcttctcacgtactcttaatcttctataggatagttattaagtcactttggcttatctcatttttcacacaattgtgtgtggtaaaataaacataacaaaatttactgttttaaagtagcatttagtacattgacaatagtatgcaactgtcaccactatctccagaacttttcatcatcccagtctttgaattcactaaataataacttttcattctgttcccctgtcccaatatctttctactttgtctttttttctctttcccttctaccttttatctttatgaatttgcctattctaagtacttcatataagtggaataatacaatatttatcttttttaaatctgttctatattcccttaatatgttttcaaggtttatccgtattgtagcgtatcagaaattcattcttttttatgactgaattatattccattgtatgcctgtaatcacatttaaaaaaatccatctgttgatggacacttgggttgtttccaccctttggctacaaatacatgtttgagttccactttcattctccggggtgtatacctaggagtagaattgctagatcatgtccaacaatgggtggctgcctgctatgtttttactgtgctaattgatgtggtgtgaaaaaaaaaattagataacctttgaccgtgaacagtatcatctgaggaggtgagagacctgcttacagatcagatgaagaatgttgatttttatattactaggctgtaagaagaaattccaaaagactttaagaagaaagaggttaatatttaaaacataagcttttgaaaacttatcttctctaacacattctactttgttttgggaggaaagatacagtaaaagtgacataaagggctttgagacatataagtttggccctgtcctgttttacaaaaatcttctcttaaaaaaaaaaaagggatgtgatttttttagaagaaatcctcatccttgtacatccatttaagtctcgtgatcttggctaggttacttaaccttcttcaactcagtttcttcatcttcatcttgatacatgcttcacaggggaaccatgggagtcaataaatatagaagctcttcagttgtgaactgctctacagatgtgcagagatgacacttttacatctatttaaaagcatacttttccaagatcatattgtaggtaaattcaataatttgttgtatgtacttttgtgcctcttttcttttctttttttttttttttttgagacagtcttgctctgtcgcccaggctggagtgcagtgacacaatctcggctcactgcatcctccgcctcccgggttcatgccattctcctgcctcagcctcccgagtagctgggactacaggtgcccgccaccatgccccgctaattttttatatttttagtagagacggggttttactgtgttaaccaggatggtctcaatctcctgacctcgtgatccacctgcctcggcctcccaaagtcttgggattacaggcgtgagccaccgcgcctggccacttctgtgccttttaatattttcttcattcctataaaaatagaagcctttttgccaagagctattggaaaaacctggcccgagtttctgtttacatatgacatgactaaatctagcccttggtttcttattcacatgagtaaattttaacagtttaatcagatgatctgttgtaagcaaacttttaagtacttcttgttttgatgtctactgacacagtacctctttgcaacaaagcaaggatattggttatattccagtaaaattattttattattttttttgagatggagtctcactttgtcacccaggctggagtgcagtggtgtgatctcggctcactgcaacctctgcctcctgggttcaagcgattctcctgcctcagcctcccgagtagctgggacttacaggcgcctgccaccacgccgagctaatttttgtatttttggtagagacgaggtttcaccatattggccaggctggtctcgaactcctggccttgtgatcctcctgcctcagcctcccaaggtgctgggattacaggcttgagccaccacacccggcctccagtaaaattttatatacactgtgatccttttaaagtacctctgatctttttaaatagtttagggtttcttcgatttcttctgtagcagattaaagaaatctgggggattatttaatcacatctgaaccccagaataattagtatttagcatgttctgttccaaaatgctttcatttattccaatccttgctaatcaattgtagctaattttgtggccatttgttaggagaaaacaagtgtttcagatgtgtttctgtgtcccttccttctctgctagatattagcaccaatcatttgtcatcaggctatacttaggacccaagcccaggaggcatttactgtcctgtgcagtagcaatactgcagacttggagtgggagagtagccattatgtgcagaaacaaaatggggctatggatccacatcccagaagatgccatttggtttcctctttattgtcctcatgcaaggtgcaaaacaagggagtaggtattaagaatcatttcatcttgtcttctctttgtgtggacaggagtctgaggtcacatgctctaagtcccacagtgatgtggtagcagaaagaagaggatgtgagaccaaggatcctgagtccccactacattattccttccagtgaaaaatacctccctgtgtaaaaagagttagttttgtagctaaactgtctgtttaaatacaagcaccccttacttgtatgcatatggtaggcagctcaggtttaaaaatgtcagatcacctcaggcactgcctttatctctctttgtccccaaatccctgaaatctttggcactgaaagtattaatgtcatcaaattctgaacctatgaaaacttcatctctgtctttctcttgtctggcctgtaacatgacaagaacagctcacaccaaagttagaagataatttcatcagtcatcacttatctcttgacactgcttctttctgttagcgttaatattttgctcctcagatcctttttctttttttttggagtcagggtctcattgactgctaagcttgggcgcggtggtgtgattatagctcactgcagcctccctgggcccaaggggtcctcccacctcagcctcttgaatagctgggacaataggcatgcaccaccatgcttggttaattaacttttttgtttttaatagagatggcggtcttgctatgttgcccagggtggtctggaacttctgggctcccacattggcatcccatagtgttggggttacaggcatgagccaccatggccggccctcttttaaaaaatacataaataatctcaaaaggaatactcttctagatgccaaggaattacgtagcttgtaggatctcacgagctacctttcttaaagggttacattcttatccattgtttatctttaatagtagatctcttgtataaacagaatattattaaaagcaatttgggaggggggcttgattttagaaaataagagaatcgtgtgaaatgaaattcctcctagttttcgactctgtgcatctcttgccaattttaaacctggcattcacactggagtgacaaatttgtggaaagcaagggaagacagaaaactgctgtaaaatagcaagggaagtacttttccagccatattggcagtgctattctgtactgtcagtgtgagaaacatctgagaataaggatgcttttggcttctgctttccttttagttccaaatcctacctgaattgtaattgagagaatgtaggattttaggaatatgcacttgaattacgcatctagttctcagattaggggagatttttctgaaattaataaaatttaaaagatatgtttgctgctttccttgtgagtggtttgccaaagccctccctttgtctacacatcactatatcatcctgtctgtgggaaatggacaactaacatgggtaggcagagaagattgaacagtttggaaatgaggaaactcagtaccaccaccattcacatgggagtcagtatgatatattgaatagcacactaagataaaagttaagaggctgggttctgtcatttataagctacgtgtcgtgatccaaggtgcttaacttctctgggtctcattttctgttttggtcaagggttgataacagtacctgctttatcaatctttcaagtttgtttatgcacatgacagctctttgggaactgtaacatactaaataattgagataatgatggtgatgatgataattaccgcaaagcctagtataatatcatgcagataaattggagctcttgagtttggtagttgaatctaattcagtagttattgatagcattcaatttggagccctgatattttcaatattatatttatccctatcatagtacgccataatcattgtttttaagatttcatggtggagacagcatttgagctagccattcaaagatggttaaaattttgctaacggaaagtaatggttagaaagaaaaacataagcaaaacatagaggcattgtagtatatgctttgttctgggaggaatctagttaggtgggttacacagggtggaatagtagaaaatgagacccaaaaaagtggcttgaggcaaaactattaaatgccatttcaaaaagttggaacttgttacttacactaactaaaaatcggggggaaatgttgggactcgattctgagctgagcaagaagccactggaaatacttgagcaaagtggatataagacttagctacaaatgacatgaagggtctaagaaaaagggttcctgtcttggataactgggtggctgttcacgctattaatagagacaaagaacttaagggaggaatgggagttagaatgggtatcggttttgccatctttgggcacatccttttatcctctctggcctgaaaacaaaggattaaataatttctaggaaattacatttaccttgaagttttgatacttctataatataaaacgccggagtccttgtgattttgtttagagatatataatcggcattgtagtgtgtaatgatgatggacattaaggaacccttgtttcttagtgccttttggaaactggctcatttcagaagctgcgctcttttcccagaggcaacttttgaagttacttaaatatttaatttaacaaatatcatttaagatttaactgtctactatccttgaaagggtcatgagtttccctcctaaaccaagactttgaagctctctgtgctgtctcacaggaatccccatgatccaacttcatgtgacctgcagaggtctgctgccttgaggagtagacaggtagctgggctgttagtggctaagtccttttctcagaatatgtggaggctccttctacctttaacagtgcttttttgctttgtttgggaagtaacagagtagtcaagtgcatgaccctggagccagactgcctgagtttaaatcctgtttctctctttagaggtagttccttgggtgagttacttaacttgtctgtgcttcagtttccacatctgtgaaatgaagataccagtagttacctgagttttgttaccgatatcaaatgtgcttagatgagtgcttggcactgggtgctactcaagtatctgttaaatacttttatgggggatagaggacagatttaaatggtttcccatagccaacattctagctttccagaatatcagtattttgttgtggtagcggtggtcttttttcctaaagaaacagtgcttcgccagaagggagacattgttccctactggctccctacttccaccgtttctcccactcttctatataagtgccttagagaaactctggtcacccttttctgtggtctgcttagctccaacaagaatcatagaccaaaggttttgctgtcatcactttaaaaatagtgtaagttatttttttctttcctttttttaaatttttttttttttgagatggagcctcagtctatcgccaggctggagtgcagtggcgtgatctcggctcactgcagcctctgtctccctggttcaagtgattctcctgcctcagcctccccagtagctgggattacaggcatgtgccaccacgcccagctaatttttgtatttttagtagaaatggggtttcactgtgttgcccaggctggtctcgaactcctgacctcaggtgatctgcccgcctcggcctcctgaagtgctaggattacaggcatgagccaccacgcccagccagattattttttctttagtggaattcagccaattgaagcataacacatggcatgaacactctggaaaggtggctttggatctttccatttgttctctttagcgctgacttttgctttctagtccctgctagtgtgttggaatcttaccccatacagatgcaaactatgaaccaagaagtcagcatctatgcctagccaataattggttgttttctcgttcagagttcctcatgcccatggggtaaattcatatttcatccataagtgtgaccattgcagaagttctaggactgctactgtctgtatttttgtccttcagcatatcccagactaaacttactcttaaaatatgtttgtccaacctttggtttccttcctatggttgatattaagcctttcttctactcttagaagacaaaatggggagacaaaaaaggcaaccctgaaggtttttatcctttcagggtatctagcatttttctaatttagccctactgaagtttcttcagtaattaatcatctgtttttcagcctctaacctggctaatattatagcctacaattgtacttttaaagcccttttgtgactttgacatattgtgtctattgtgtatggaaaagtagcaggatcagtatgaagataatacagtatctcttaaaacaggcagccagcaaatgaactttctgcattggtcagaatttccatcatttcactgttaatgaggaaagtacagttctttagctaccatgaaagtcaaacatatcctaagccttttggaaaaagacatacatgttagaaaatctcaaatggatgagtcagcctgactgaccccacattgactccattttatatgctggccaaatcctgtttctgactttcctggcacagccctggacatgcttctgtatcataggacttgttccccagcgcctttgctacttccttcaggcacattcctaggaaagattggcagtggggtttgctctttgccagcactcctgccggtttgggggttatggatgccaggttgggctccaggcactctgctctccatttgtggaggcagggacggtaacagcacctgacaagtagggatgatcacattgtattcagaagcctggtggagctctataaacccaaatttctaacagtctccaatgtaatgccctgtaatagaagctgtccttaaccctcaatcatctgtattcagctagtataaaaatgcaaatctgctcttatgcctaaacagttaggagtagaggagacttggcttcctttggaaagtcaggatgatagcttcatcccattctggtttttgtgattaattgtgacctacaaaggggtttactactctagcaggaactttgaatttcctatatacatctctttctggttagcaggcagaggaaatatcgttgacttttggcttcctggcaaatgtctcatttgccttgtcatttgttgattccttttccctgatctctgtttggtgtgataatgtacagcaaagctgaaaaccgcagggctacatgtacacttgtaggtacctatgttgtgattgccaaaaggctcagaaagccagttttctagtgaaaatggctaacattctaagaaatgctttcactgagaaagagaacgggtcaggggaaggtggaacttaaaggaagatggagtgttcctgaattcagattcctgaattagccatttatagtttcatgggaagacaatgaaaaaaaaaaaaaagaaagaaagaaaagaaaagaaaagaaacaagcaaccccaaaggtttttatcctttcaggtatccaaacatctttattctagaaagtttctcctcgatggtaaaataaagctaggaccttatagcaagtctcagactcaccatggctgtttcttaacaccagtataccttaagcagtaggtatcaatttagtggaaatataagggtattgatatgtagtggaggctgctctgaacttggaggtggaaatactaagtttaaatcccagcttttcttttaacattgcaactttgagaagtcttttaaccattgtctcctgtttgtatcagcatgaggggatagataataaaacctgcctcacaggagtgttgtgagaattgagtgaaataatgtatgtgaaaataccaagtacaatgcttgcttagaaagtagaattttgttttgccatcccctcccccactatagttggcagggcagggggaggcagtatattcatccatcaatattatagatgcaattgttcccagatgttttgcttttaggcaaaaccttgtatagatgactgtataccctcttacagttgatgcttaataaaacaaaactaccatggttttataatggaatggtaagctcaaacattttgctggtagtataaaaaccaagtgcctgtgattacctatacattaactcctgaagaatcaattataatctcagcaaccttgctctttgaccattcattctaaagcttggcgaagttaatgagaacagataataggagtgctaatgcaattggaagacttttttttttttaaacaaagtaaggaagggatacatttttaaataaaacattgcattttggtaaaaaacacagattatgagaacacattgagttagaggaacatcatattgattccaagaacaaaaagcatggtggagaaattttgtaaccatgcaaatccagtgtgctctgttctcatgagttaaaaagaattttcctcctatagaaacttgttatttaaatgtgtgtcacatgtaaataacagtctaatgagagcaatatagagggagaaatatgtaagcaagggaaagtgggcattgttttgtttttttttttctccatctatttcaatacttgggtctttcctaacctatagtgtgtcctgtttctccctggctagatttcttaaagtttctgcctattcatcactcaagtacctatctcaagttgtagctacttttgtgtgcagggtgtaatagcagatgttctcctgatctagattttgttgctctgcctaactgcatgccatcatttgtttctccctttgtgatcttctactgtagtcaagtgtccctttagaacaaacttcatgggatggacatagcctaatgagctcattgctgatgaagtctttttttcctgtgcattggttagtgcagtaagcaaggctccttaactgcctgtcccagtgtactgaaaaataatagtgttctctcaccttaaactacaacttgtggtttttgcttattgcttctttagtctttgaccacatgcatgtttttacatagttgcagttattttattatattcctttttctgtcataaacactttccaaatgtgtttgtggtactcaaattatagcttagcagttaaataatttgatatattacagtttcccctcttgttaggtgtatccaattttggggtttgtttgttcgtttttgtttttttctgttgttgttgttgttgtttaagggaagcaccaaaataaacctctttttaaaattaattaattaatttttttgaggcagagtctcgctctttcgcccaggctggagtgcagtggcactatctcggctcactgcaagctccgcctcctgggttcatgccattctcctgcctcagcctcccgagtagctgggactacaggcgcctgccaccacgcccggctaattttttgtatttttagtagaaacggggtttcactgtgttagccgggatggtctcagtctcctgacctcgtgatccgcctgcctcggccttccaaagtgctgggattacaggcgtgagccaccgcgcccagcccaaaataaacatctttatatgtaatgttatttccctaagataaatttccaggagcttgatcccagggtaagaagctatgaacattttcatggctcttgccttataatgtcatattttgctttttaacctttaacaaagaacattcctatgcccttgctttcagatgggtcttttcttattgtgaggaaagggctaacgtaagtcccatctagaagtgactaacttgcctagttaaaactagaaggaaatatccactgtattgggctgtttactccataaaccctggcttggctacatgtgtggtatgtttcaagtctggcacaaagccaccaaacacatttttggtgagttggttttaacctgctcacatcagatatgaatgctgaagttggagctttcattattgtttttgtgctggtagaatgttgcagaaatacacagggctggctgtgtattcttagtcactttaaaaaaaatgtcctggtgtgtctagaatgatggtttctgttctttgcaaaaataaaaacatcaaacaagataaagtccgatgtagccaagaccctctacttgaaccttctgtcggtactgtttgtttaagtactgtaagtttccacggttcatgttatcttaggatatcttgtgaaacgaatccttgtggtccctactctgggctaacgctttgtgacttaactttttacagtgaacataaagattctgaaaagaaacacaaagagaaggagaagaccaaacacaaagatggaagctcagaaaagcataaagacaaacataaagacagagacaaggaaaaacgaaaagaggaaaaggtacagagttttctagtaggggaggaaggaacgtggatgcacttttgtttacctttgaaagcagatatcttaattgcatagtaagatcccttggtcttgaagtgaaaggtttcttgtcaggagaatttagagcaaactgtagtcttaaactataaaaactaagccttttaccaccatatgtttcacagtggcagatctgtccatatcattaccttttttactttatattgccaatgaatacattgagaatgcattagggaaaattaattgtttttgggagaaggcctaatgccttgatggtcttctgttcattaaaggttcttcccgagtgaaaatttagtgatgctggtgtcttttgtggcatttggttccagcataaccagtgcaagccttctaaaaatgactaggctcacccagctgagaatgaatagtactctgtatagttttaaaaagagattgtttttattttagctttgaaaaagtaatttttgtacttggtaaattcagatactatgaaataaggaatatggtgaagaagacatctcttcacccctgactcactgtctcccatccttctcagaggcaaccgctatactgattatgttttgtattcttccatagatactctgtatatctgtatgtgtgtgtgtatccctttgtgtgtatatatgaagatttttttgaaagataaattttctgacgaatctagaaagcaggaagtcaaaggggagggggtcatgagtatactttgcctaagtaatagaagacagggcatagactacttttttgtttgtttgttttttaaataaagatgggggtctcactgtgttggcggggctagtctcgaactcctggcctcaagcagtcctccaacctcatcttcccaaagtgttgggattacaggcatgagccatcacatctggcccagtttatatgttttgtttgtttggtttttgcttttgtttcctctctgcactgccaatggcaaattcttgagtagtggaatgtatttattggggaaaagagacctgccaccacttaaaagtaaaaagctgccatttttaagggaaacctttctcagtgagttggacagtttcacccagaagaattgttaaaaacgagttttggacacatttcaggacctttagttcatctgttcagttttggtaacataagagccagcttgtgatcatgatgtcccaggaactgatgctacatattctcaaaaagaggtttcttcaaatttagtcctttcaaggtactagttactgttgttttacttttcaggttcgagcctctggggatgcaaaaataaagaaggagaaggaaaatggcttctctaggtaagactttgctgctgcgtgggcttccctttctctgggtggacagcaggccagctgcctgtgttgtagtgttgtctgagttaacccaaaacccactgacctggccatcttgatggttcccagaagctcagcagtgagaagactcggtctaagccaacctgagcctttctacagtgccatatagtgagactgaccagcacattttccagaaggttatttcgaatagagaaggttgacaggagagatttttaaaaattgagatttgacttgcatatcacaaaatttgtattttaatggtatacagtgtaccattttttttttttttttttttttagtatattcacaaggtattgcagcctcttcactaattccagaacattttcatttctctaaaaagaaacttcatattcagtagcgattatggagttttctgaaaaatcacttagtctgatttcatcattagtaatattgggaggcttatatataaaagatcatttgacctacatgttagggatgagtgtagatttgggtagaattatgttatctcttttctagaaggagaggaaaatgcgcaaaatctagaggttacttcctatactgtttttacctttataattttgttttcctcagcctcaatttcctaaaataagcccagaggtcccctctagtttcgaaacaactagatgtttattgttacatattctcacttcactgaatgacagaaaggatttattagaaatggttgtaagtgtttgcattattgactgggacaaaacactttgagagttttgcttccttgaatctttgaactttcagtttcatttgttaaaatttttgacaattgtgcctggtactctggggtcctttagacaaggagaaaagcaggtgccctcttcaggcatgtttcataattgttctaggaatgcagaataatacaattcaggaagcattagagctgcaagctgccctaggaattttgatttctgagataaagtgactgaggaggcactgctgggctaatctctgccaagagactgccttggatttttattaaactgatatgaataaattttttggacttggtgcatagtcatgaattcattttcagactttttgggttagaagattaggaacacagccttctttgaggcagtggtctctatgttcactttgctggactccttgctggcttgtgtatatgtctttgtagagaatccagatgcttcactggaatacagttttcaggtaaattgttttaggacttcttccttcagacctaagtaacccttcccacagtttttgtcttcagtgtgacaaacttaggatctagcatttacttaactagttgggtaaatgataggctttctttccttctggaccctagggtctgtgtcagtattcaggcaggagggggaacagctgtagaagctggcatttggttagggtgctaaaataagttctttaaacattcaaattctatcacaagcaaggggacccagtatgctttttttggtcggaggtactcttgaaaccctgtgaatatactttgcagtggggtcgggattcttaatccttggatccctccacagggggcagctgcatgtaaggaggccatttcttgtactaagttaaggcagtgaggttctgaagagatgtgccaggccagggagcatcccatggctgcagtgattgctgggctctatggtgttttttacttgttccttctctgttttggttcaagatgtttgtctcaaaggattgtctttttatatttatattttgaaggtaagatcttaacaaatagtagtgagacactcttctgtatataaagtaaacctaagttaggacgttgaacaatgaatagatttggcataggataccttctgtttattctggtttaacacgtgccctacttttgttgtaatgttgtcagcttggttatttttccatgtagctagatatacatgtacgttattgccacatttttagaactttaaggtactaagttggggaaatcaatgtttattcctttccttgtaaaagctgtactttagcttttagagtactggaacaatcagttcagattgtggggtcaaatatatggtaggtttccatgtaaggcaagaaaacaccttaggtttatttctggagtggttcgtgccatgctggcaaagatagctaagaaatagtgagaaagaattctgacttagaataaagagtcttgatcccaaatcctgatattgcccattcacctgtacaatgaggacaaatactatctacttcacaggattgaagtgagaaaaagtgctcacagaacatcttcatgatatgtacgtggttatccttatttctgttagcttcttttcaacgaaatgacatattccttctttgtattaatagaatacagatgttctagcactctgaccagcaattttttttctctttagtccaccacaaattaaagatgaacctgaagatgatggctattttgttcctcctaaagaggatataaagccattaaagagacctcgagatgaggatgagtgagtattttcttaaaactttgacttttgaaaacaaaaaggaggagtttaaagaataaatgtgatgtgtttctttataatacatatagaaactgcattaattggcttttactcatttggaatttgtgattaatggactgatttctctgaactatgagaagtagagtttgctaaacaagtagtatacccaaggcttacatgaagattatataaatttttattactgaaaaggcaatagatatttattgtagaaatttcaaataatacagaattcatgaagaataaattatttaagttacttaaaatttcttattgcctaccacagataacttaaagcagtttctcttagacctattcctgtcagacattctaagtgaagtttcagtgtgtaaaaataataaaactgctcataaaacggtcgaggcttacatgtatctctttccccagattcaatgagattaaattatattcattattttcactcttatatagcttactatgctattgttatagtagaaattggatggaaagggagaagggaaatacttagtgaactcatttgtattcattcaatatagaatttctttcctccacattccagtgagttactgctatgtggtagctagtgtgctgtgtgtttggttcccaaactttcatcttttatttttatttattttattttattttttttcccagactttcatctgataatgatatttatttctgcatatatccccccaccctattttgcttccaggccggtgtaagtggtttgttttgttctatatagggctataactattactctttggtctgaccttcattattttctctatttctgttagtcttgaccgtagaatgcccagccaagaataacagtgattactcttgccatggaggcatccaagagtttgtaggtctcctatgagtgagaactcctgaatcataattatgttaactgtgtattcatgttcccctttctagtgctgattataaacctaagaaaattaaaacagaagataccaagaaggagaagaaaagaaaactagaagaagaagaggttagtaaagagacttaggtcctttggggcttgagtttggaagtgggagttttccagtaagcaacttcttaagacaaatgagttttagatatttattggcttgttataacattagggaaaacaaatttaataagtggtggctgtggcactggtagttttaagatctctgtgaatccccacagtgtcttaagttaaccacaaccagcagtgattctgctctcagccttcctgggtgtctgtctacccacagctaggctgccaacagatgttcttccaaaaactatgtcatcttcatatatacagaggcagtgttaacaagaaaccacattttggcttataaccctgaagaaatttccctaagaattttttgctgatcattcactttaggtaaccattcctatctaaagttctttaatgggtacccctttgacatataattgacacccaaactctttactgcagctcctcccaatctggcccctgcatcttgtgtctctcttcatcttgtgcctcttctctagcttacttgtaccagtcacactagcctcctttgtttcttttccacaccagattctttcaaacttccgagctttacgtagcacctgctgttcctctatctggaacacacatgctcccttctttatccttttggcctataaccttcctcaaaaaactcagttccgtttaaatgctttcctaaatgttcttgttgatgcttgtggtagattgaaaatagaatcatatgcttcctccttttgacacttttgagttcttgtaccaaaaaattgttagcaggtaattcaagaaaagatgtcagaaattcacaggggtcttaatgatgccctcccctaagacaagaaggggttgggtgagttcttagctcttatgctacatttgaggttagccactgtcatgggcaaaatgggatcacaaatgtaaagtggacagtttgaagtaccagcagtaaagagaatgatagtgaaggggcagggagtcttaagaggataatctatcataatagaatgatgttaataatcacaattaaatgtaataggtgcttaccatgtgccaggcactcttctatatatgtatcatttcatttaatccttacaacctgaataggttgttacatccctattatcatctccattttgcagatgcagaaatagagtatagaaatatttaatcatttgcctgaggtcacatagctactaaggtggaaaagccagcatttgatcccatgcagtctgacttcagtgccagcacaccagctactatattatcctacctcccctgggactttgctgatgctctaattctgcaaggagggagaagaaaggtctttaatgaaatcatatgaagaccattagtgagtgagttgagccatagagagatgatcaggtcctgaatttagaaggttgccgtttttttgacaactagtctattcttggccgaagttcaaattaataagcactaattcaaggaattgagagtgaaatgttaagtagtgattatggtagccaatcactccacttgcatataccaaatcagtacagactagtcagtaaaggaatataaaacttgagttctccaagtgttttttttttatgtttatattgcatttatgcaaaaataatactctgagtttgttaaaccattgggaaaaaagaacagttgacttcatttgttattattctatttagcagccctaccacatagggggaaaaatgctggctgaaagactgaattaatacaatcttactgtggcagggaccccagatggcagaatctgtcattaaacctcactcgccaactatagtttttttgttttttgtttttttctcttgtttttgagaattgttctgaggtctcttagtgactgacaccccaatttgaggcttgaaaacatacaatgtagccagtagtttcctgatgggaccagctggatgcctgctcagaagctgtttagagtatcttcactgaaaaacatttccctttcctgtggtgtgtttcaccctaaatagtaaacattatctgaattaatgtgatcctgtagtaccttctcccaaacatacccacatatttatattctccgtgcctgttttaaaatatggatggtactgtaagctttcctcttttttctattcctatcttgattgccatcctattatgaggatctaaaatgtttattccagttattcccataagtcacattctgttatttttctcataaagttaggctcttatcatagttaataacagctatatgaccttgatcaagtgacaaaatatgtttcaaagtccttgattgtaactggaagtggttaaatgaacccatccatacactttccagctgtgccactctttaattgattttaagatggttcaaaaccacctttcattgctatataaaacttgttgaataaagactgaataagtagttaaattatgttgaataggcaggacaaaggaaaatattcttcaaaagagttcagattctgagtgggatcttcacttgttgaatattacatttttgtttgggttttgtgtgtatgttttgagattcatctcctgtattggtgaattgtgcctgtttaggtttgatgcccgtttattgtgtcactgtgatcagctcatttacattcagagttcaaagaagagccataaagaaataccaccataggaattggtgtcattttagaacctatcaaatacttgcttactgcatcatgactttgtgtatacaagcagcagcgatagtactatactccactaaatcaactgggaattttctttcatcctgaatactaaatatctaatgcaaagccccgtctagccgttatttgattgtactggaagaggtttaaagatgagtaggattaaacataagtgaggaaaatacactcggattactctctagagcagtacttttccaaactcctttgaggttaaaaaaaaaaaagtttcccagtctcttcccctgcagagtgttttttaactactttctcaagtagttgtttgtcaggaaattttaggaaatactgctgtagaacagagcaccagtacattgttattcatctgtcaaatgagaggagtactaagatcttctttagttctaatactctatgattacaatttttcttcctcatggctcccaaaaactgcctccagaagtgtgatcagtctttatttaagtgctttctcaccatgtttctttgtaggatggtaaattgaaaaaacccaagaataaagataaagataaaaaagttcctgagccagataacaagaaaaagaagccgaagaaagaagaggaacagaagtggaaatggtaacatctcagcactgggttaaaatgccaccttttttattgcatatccttacgaagcaagagtattgagttattaaaattaatatcctgatatttggggggaaatactttaaacaatttctctagagtaactttctgaagtaagttttccaacttctagtgaaatcattaactggttctaaatctattggatctcaaactggtttccaccactgtgaacagaatggactgtagaagcagacctatgtataggtgggaatttagcatacgaagagagtacagatgcatttaaaaccatacggaaaggacagattattatgtaagtcgtgttgggaaaactgcctgttcaacaacagaagaaacctcaacaagaaaacgtgggtgaatatttttataattgtgcagtagtgaagatcctttgaagcaagacataaccagagccataaggaaaggtgttttacatttgatacatcaaagttcaatttatggcaggtggacaccttcatgccatttaaaaaaaaaaaaaaaactcaaggcaaaatatttgcaatacaaagggctgatattcctaatatgaaaaaaagctcttttaaaacaaatatgaaaggaatgatctaatcagaatgtgaggaacagtcagtttagtaaaatagttaataagcatctaaaaatgtgatcaacttcataagtaatcaaagatgcaaaaaaaatgataaatctttttgtttaatgcctctcagattgggaaagattaataagtgaaaatatctagagttgcaaatgtaagaaaacaggcattcgccttccctataggagtgaaaattcagtctttatgaaggacagtttagtcatagctggttgctcttgagaagtgtatttaggtggagaacttttctacttttgctgtttagaatcttgaaataaacatgtttttaaaaaatacttatttctgttaacatgttctatttaactactataccagcagtacatgattttgtgtttatgatgaaaaaactcaaatgattgacagatttaatagttagaataaaaatcaaagtcacctttacctgtcttctcccattctcattttcctttccagctttccagctttgaggtaatcactgttcataatttgatgtatagccttccaaacctgtttatgtgcctttatggcttttgtaatttagaactttgatgtccacagcacctctgaggaaagggagaaagagcactgaccaggaaggtggcagagggaaggagagccacagtggcagaaatgtggccacacggtgacagctatgtgattcgcatgttgctatggcatcatgggattaaatgggaagtatagaaaaggaatatcacagagcagagcaaccctgcctctttctagaggtcagagtcagaaagtaaaaggccaggcacagtggctcgtatctgtaatcccagcactttgggaggccgaggctggtggatcacctgaggtcaggagttcgagaccaacctggccaacatggcgaaacctcatctctgctaaaattacaaaaattagccgggcgtggtggtgcgcacctgtagtcccagctacttgggaagttgaggcaggagaattgcttgaacctgggaggcggaggttgcagtgagctgagatcacgccaccgcactccagcctgggcgacagagcgagactctgtctcaaaaaaaaaaaaaagaaaaaaaaccccacatgggtttattttcctcatttttatttcacttttcttaagaactaatacattttcagtgatcttgacctttaagaaaatgatttttagaaataaagtgattgtgtaaattagaggttattattgggagttaagagaatggtaggttagtaattcatcagtcagggttctgtggtagttactcaataaatgcttgttaaatgaacaaatacatttccttatcaggagctccctgctgtctcccctttacttcggagctttggctctttttgggatccaggcaagtgcgctgggtccagccttgtatgtgtagaattaggtgcccttgaggggtttaggagcctaattttgcttttgtggttgaaatccttatcagtgttgccacacattcactctgacagaccatgacttttggtttttattcttattttgggttaaaggggaactggctagtctttaactaaaagttgttttttgaggaatgagcagactttgctacagcttctaacgcatgcatttctcaggtgtgatggttaaaccttgcacattcttttcaagcacagtgcttgaatggcacaccgagtttttggtgttgaaaatatgaatgaagagcctcttaactgatagctagaggctgtgtatcatactctgaagtcagttatccagtcctcagtgactgccactgatgacctagtcggggagttaaatggcagatacccttatttttactattccttatgctatcctactaaaagaagtacacactttacaagcttgacaaatttgcagatctttttcttccctcgtaagtccgcagacctgtttgtctttaccagaaaaaaccacttactctgatctttatctccctcctttggtaattgttcagttggaaaaggtccaggtccctcagggtttctttgctatatcacgttatctccatagaaacattgttataagtggtggcagtgtgcttgggttcatacatgaaatcctgtttatcccagatgtcctgatttttaactgttggccattgtagctgaacagggtttcagcactgttgggttaattaagtacacttttgtgtcagggctgacctgggaatataagttgccagttaattctcaacagatgattcttcataaagaattacctggcgagtttattgcaggtgttaggtgtgactttaaatggagttttcaatctcttagcaaaggtaaaatgctgtgatgagtcaggactataatgttttaaggaattagtgttgcaagaccaagactcataaatatatggtcaatgatagtggtaagaaatttatggaatatggattattgacattttgctcaaaccagaaaaacttcccttaatttcaaggattagcattcagaagctacagcatctgacctttatttctaaatttaaaaaaattaaatatgagttttatagcatactgtgaagtgcttgttaactgcaagggaacttgatatcaaacagcacatggagtttactttcctgtctttatatttctagcacttttccacctttcccccttcaagcaaattttattattaaattggtacttgattattcaagtcaagctgccaaagggaagccatttcgatgtctaagtacatgtttttgtttgtttatttgtttttaaattgcggggggcggatatatgcactcatggggaggctaaaaggacagaactgtttgcttttatttgtataataatagctgtcagcccagtcacatgagcttactgaaacagatattctgtctttctgtttaaactgaagtttagtgttgtgatttgctgaatctcttaatttgcttaaatggtaaagaagttgctgtgggtcttcaggatacacatgttgaaataggagtcgtaaaaacagtttggagtcttgatttaaaaacactgtagggccgggcgtggtggctcacgcctgtaatcccagcactttggaaggccgaagcgggcagatcacgaggtcagtagatcgagaccatcctggctaacatggtgaaaccctgtctctgctaaaaatacaaaaacaaaattagctgggcgtggtggcgggcacctgtcgtccccaggtactcaggaggctgaggcgcgagaatggtgtgaaccctggaggtggagcttgcagtgagcggagatcacgcgactgcactccagcctgggcgacagagcgagactctgtctcaaaaaataaataaataaataaaaacactgtagtcgatgagaagaatggtgccaaagtcccaggataagggaaagggtggcgttcggaatctcctcacggttactctgtgactgctgcagacaggctccttgcagatgctctcatacacctacatatatatatattttctctatttggagagtaatagactgtaggattgggtggtttcctgcattgagatccttctattaatatatcaatgactctgccaatttcatacctgaaaaagtggtaggttagttatagaagatctttaatattcctttgaggtctaagattctgttaaatatttttgtttaaattgtgtaaaatacatatgacataacatttatcatcttaaccatttttaagtgtacaattcggtggcattaagtacattcatattgttgtgcaccatcaccatctccagaactctacatcttgcaaaactgaaactctgtagttattaacaattccccacttctctgttgccccagttcttttttttttttttttttttttgagacagagtctcgctctgtcgcccaggttggagtgcagtggtgtgatctcagttcactgcaaccttcgcctcctgggttcaagcaattctcctgcctcagcctcccaagtagctgggattacaggctcccaccaccattcccggctaattttttatatttttggtagagacggggtttcgccatgttggccaggctggtctcaaactccagacctcagatgatctgcccgccttggcctcccaaagtgctgggattacaggcgtgagccaccgtgcccagcctattcccccagttcttggtaagcaccattctactttctgtctctatgaatttgactactttaggtaccttgtattaatagtcatacagtatttgtcctttgtgactgactcatttcacttaacagaatgtcaacgctcgtccatattgtagcatgtttcagaattttctgacttttaaaggctaaataatattccattgtttgtcctgcattttgtttattcattcatcttttgatggacatgggttatttctgcctttggctgttgcagatagtgctgctgtgaaacattcgtgtacaagtatttgtttgaatattgagtatattcctgggaatggaattgctgggtcatgtggcatttctgtgcttaactttttgaggaactgccatactatcttttccacattggctgcacctttttacgttcctaccaggaccacacgagggtgctagcttccctacaccttcaccaacacttgttattttttgttttattgccatccttatgagtatgaatggtatctcattgtggttttgattggtattttcctaatgattattgatgttgcatatttttgcaggtgcttattggccacttgtatatcttctttagaaaaatgaccattcaagttctttgccccacccccacgtgtttttttttgtttttgagatggagtcttgctctgtcgcccaggctggagtgcagtggcgcaatcttggctcactgcaacatctgcctcccaggttcaagtgattctcatgcctcagcctcctgagtagctgagattacaggcgtgcaccaccacgcctggctaattttttgaatttttaatagatacagagttttgccatgttggccaggctggtctcgaactcctgacctcaagtgatccctccgcccgctttggcctcccaaagtattgggattacaggcgtgagccactgcgcccagcccctatttttaattttatcttttttttcccctccaccttaagactgagactttgcccatttttttaattgggttgtttattgagatgtaggagctgtttatatattttgtatgttaaccctttatcagatacatgatttacaaatattttctcctattctgtgagttgtctttcactctcttgaagtgtcctttgatgcacagaagtttttaagttcagtgaagttcagtttatttatttattgagacagagtgtctctctgttgcccaggctggagtgcagtcacgtgatctcggctcactgcaaccttcacctcccaggttcaaacgattcttgtgtctcagtctcctgagtagctgggattacaggcgtatgcccccatgcctggataatttttgtatttttagtagagacgggggggtctcgccatgttggccaggctggtctcgaactcttgtcctcaagtgatccgcccaccccagcctcccaaagtgcggagattacaggtgtgaggtactctgcccagctgcaattcatttattctttttgttacctgtgttttacgtgtcatatccaataaatcactgtcaaatccaatattgtgaagcttttcccctatgttgtcttctaagagttttatatttttgctcttatatttaggtctttgatccattttgaattaatttttgtgtataatgtaaagacccagtttgattattttgccaacactattgttgaaaaaactgttctttctccattgaatggtcttaagcatcttgttgtaaatcatttgaccatatatgttgactttggttttatagtaataccattgttacaatatggtttgatacatgtaatttttatttgatgtttctgaactttgtttaaaatattggacttgttccatggctgaatgattgataataaaataataaataaaatattgtacttggaaagtaaatatgagggtagtaagttagttatctattcgagtaaaagaaacttgaggcatagccagttgcaatttgtgagcctgagttggatcctggtctataaaataaatttagataaaatagggaagtttttaatatggactgggaattagaattatactaggagattattttgttagatgtgataatagttttgtggttatgtggaagaatattatttttatagagatacttgctgaaatatttagtggtgaagtatcaaatctgcaaccaactttgaaaatggttcggccaaaataggaaatgtagcaaattattaaccttttttttttttttttttttttgagatggagtctcactctgttgcccaggctggagtgcagtggcacaatcttggctcactgcaacctctgcctcctgggttcaagcaattctcgtgcctcagcctcctgagcagctgggactacaggtgcgcgccaccatgcccagctaatttttgtatttttagtagagacggagtttcaccacattgcccaggctcctgacctggatcacgacctcctgacctcgtgatctgcccgcctcggcctcccaaagtgctgggattacaggcgtatatggtgtttattgtattactcatttttttcttatgttcgaccattttaaaaatacattttcaaaaagttgttcccactgagctttagattcacttatcagtgtttgctagatagttccaggtaatgcgtaagtaccttaaactcaacatgccccagttaagctatcatttcctagtcgtcttcctttatgtcctttctcatagggttgttttctcctctaccttccatctgacgtcaccactctgaggaggccttttccttacaaacaatgtaaacaatccctctgtcatgtatgccattgtggtaaaacaactgtttacattttcaagtccctcacttgttactgagctccttcattgttgatctcttctgtccagtattcttaaactgagctgttgaaatgtattttcctttattcaccacagtatttcatcttacttgtgagcgttggctttttcaaaatgagagacactggttcttttgatccaggccttgaatgtgaggcccagaagtcattccagagcactaatcagttgagcggataattatttggcatttaatcagtgatgatccccatgttagacaaggcgatcactaaatgaggctgtgctttgtcttttaaaggtgggaagaagagcgctatcctgaaggcatcaagtggaaattcctagaacataaaggtccagtatttgccccaccatatgagcctcttccagagaatgtcaagttttattatgatggtgagttgtttcaaggttcttgattcttggccaggaaaagaaatctgcttctatttagggatagaaaacaaggaaggatcctatgtaatagataatcctttttatttcattttgttttattgccatgcaattttgaggaaggggcatcaggtgttaactcttaaaggctcatttgctgctgaaaaagtgccatggaaaaggggctattcatgtcttccctacatagtccaaaaaaggtttgtcaacatggctaacagtgtgtggtccacaagctgaaggttttgatctgaacttcatttctagggagcaactcttcgcaagagttattagaaaagcctcacttgaatggtagtattttatgttagcaatataacaatgcaatcggacaagctgctcatcactagaaacagtattagtatatggtcgaggattaatagtctgccatccatctctagatagggctggtaggcatctgtcacctattctgtgtagcataacactatgcctttgatatatgtgcaatcaagtctgatgagctgctttaaagaaatgccctgcctgggtctcttagaaccctcagaattgtcccttatctgtcgttggtatttgtatccttgggtttgaaggatttgagggtagcctttgacatgcctcctgttggcagtgtagcagtatgtagatggtaataactgattttcttcattccatgagttttatccagaaatggttagagcattgttcctcatacccttatgtgcttatgactcaccaaagtggatctgagcccatttaacagttgtggggtgggcttcttttccctttccccaccgtccctcttcttctttcccctttcccaaccatccttccctcttctgtcccctttcctgacagtcccccttctcctttccccagcattcctcttccacctccacttgtcttaccaccgtcttttggccactgttatttcaccaccccatttctccaccatttttcccaccctcagccccccactgttttcttctcacccatcccaccgcccgcactgaaaagaaaaagttctggggtgggattgagtacttctgaaccaagtggtctgctgaccaaactttgagaaacactgggcaggataactgctgaaaagcatcagtggtgaacactcaggcattctggtgcatctctcttcccaccagtagtggccttaggtccaccaatgcttgtaggcctaggtagtagtttacactaaagggctgggtctgcaactgaagaaagtgccaaacttggcaagctgaaatttgttttttaaaatgccatatttattagccaagtgtggtggtgcacgcctgtagtcccagctactcgggaggctaaggtgggaggattgcttgagtccaggaggcagagattgcagtgagcctagatcgtgccactcccctccagcctgtgtgacagagtgagaccctgtctcaaaaaataaaataataaataaataaataaaacatatttattgaatgtatttgtggtcagacaccaagacccagcagtggatagtactactgacttagaccctgatcttggggagtttgcagcctaacaggactccataatctcagaggcaaatgcttatgttatgtaaacattttgacctgttgaccagagagcctaagacagttctttcagccctcacgctggtcattcctggagactcttaactataactcaaagccaaaactcctaattaagagaaagggcctagaaccttgaagagcaccatctcaaagcgtaggtattccgtaggcctggtctggacttaccaagagctttaggatgctcagctggtaaagcctcactttgaggttcaaagtgatgggagggaaagctagattccctagtcctgtggtttctcttccttttcaagataggaagcagaggcctggtctagttcacaggttgccatagtcctttcctcccattcttgcccagtcctcctttacaggatcctgctttagggctccagcattttctcagctggtcctctgctgggatttcttctctttgattgtgtgaactcttactctgcagtaagtcaagaagtcatatttgactttacttcaaactgatacagtaagtgctgcctactctctggggaggagaattcttagactcctttagaacttgccagggaggtggggcatgggctagctgaagcagtgaattactgccttctctgaggaccttcagtttacagctttgattcagcagtttccttttcctggagctcagccttttccacaaagtgttaacattgccaggaaccttccagtcatcctcccactactctgatgcagggagccatcatttcatcttttgacagctcatctaaaataggaggagtcacagttgcttctccctctattaggacagaattcagtaaaacagcccaaaatctcattttttttaaatttatttttatatttatttatttgagacagagtcacactctgtcacccaggctggagtgcagtggcacaatcttggctcactgcagcctccacctccaaggttcaaacgattctcatgcctcagcctcccaagtagctgaaattaacaggcacgtgccaccacacctaagttttgtatttttaatagagacagggttttaccatgttggtcaagctggtctggaactcctgacctgaagtgatccttgcaccgcctcctaaagtgctgggattacagatgtgaaccaccatgctcagccacatttttttttaaatggtgttaacagtttacatttttttcttgccattttatttcatttattttattcctaatgacttaatgttttcctttatattggaaacatgttacagttttctaaagaagttcagggaatcttttaatacacagcctatcttccccgaagtgtctttcttccaaagcagaagcttgggggttgatgggggcagctgcgccacctgttggccttttaagttaatggcgtccaaagtgggttctttctattataactgtttcaatattgtgctacagttctctacacccctgcaaagtcagattgcatatcattatgagataagatgtcttctgagttttgaaataaatggatttctggttaaattttagttttctataaagaatgtgggcagccttggtgaattattaatacctgtgtaatagtaaggtggtggaattatagttaacctcattttaagtatagccaaatgctcttagtatagcatggattggttcgaggtgatgttgtaaagttggatttttaagaaagaatggaaattggcactaagagtactgtcaaaagcatttgtttgaaaagtggattaaattcccaagtacttttctttcattgctttattaactaaatcaggtatataaaacccataggccctattcagattttctttaccagttagcagctttcattgtgaaaacatctgagtccctttagacagctttttgtttatttgagacagtctcagtctgttgcccaggctgaagtgcagtggcgtgatcttggctcactgcaacccctgcctcctgggttcaagcgattctcatgcctcagcctcctgagtagctggagttacaggctcccaccaccacgcccggctaattttttatatttttagtagagatgggttttcgccatgttggccaggctgatctggaactcctgacctcaagtgatctgcctgcctcagcctcccaaagtgctgggattacaggcatgagccactgctcccagcccctttagacagcttttacataaacaattggatacaccaggaaccccagtcatcccttgtgctgtggatgcatcctggttccctgaaagaggcagcatcatggtacccatgttccagagcagtgtgtcgcaaactctagtgtgcatccaagtcttgttaaaaatgcaatttctgtataggattcagtaggtctaggagggggcctgggattctgcatttctaaactcccacatgatgccaatgctgctggtctgtgaaccacttgttgaatagcaaagttctagaagaaggtcttattaggcttttcatatgggaaatctgggcttgcctagtatggatatatatttttttattcatattccacccacctaactttgaagaagaaagatgcctatttcttttccccacaattcctttcttccactccctgccctatcccttcctccccttcttgaacagaggctgcttagcttagcagtggcaggagtccctctgaggatttgatttttaaaaaccattgaagaggtgtaaaggaccctgcttgctgaaaggaaaaggaagagtgactgggcctcccccaggtcatccctgtcctgagcaggcacctgggaacaattaactggcatagtctccagagaatgacccaggtaaatatatgctaaagagaaggagaatttgtacaagtagatataaatcagtatgttgtctttgttgttgttgctactatgtgtcaccagacctttatataccatgagaaggcaaaccattattaaagagaattcgctagccctgggtatttatgcttagaacatgaatactatacctcactttttggaaccacttttttctctaggtaaagtcatgaagctgagccccaaagcagaggaagtagctacgttctttgcaaaaatgctcgaccatgaatatactaccaaggaaatatttaggaaaaatttctttaaagactggagaaaggtactgtagcccatgtgttaatatcctagtaccttgcaaaacaatcaagtactaagtaataaattatcattttgcaaaacatttcctgatgtaaaatttgagttgtatggattttgttgtatttaaacttgcgtattttttgtcttcatttactatattatgtagggtttctgtccaacaagagtacttgtatatctttgctattggctctcatgtgatggcaggtaggtgggggttatcagattaggccaaacagaaaacctcaactccagttgcgcacaggaaagtttgtcgctgcaggactgccccgtgtctgctgttgcaaagagaaatgttaatctgatgtccctctcgctgttaattcttgctcatttattttaggtactttctactcttgaaaccacatatactatatttgcctaggtgattttttaaaatctcattattctcaatttggataatgtggacagaggcagcagtaaagtttacttcctgaactagctcagaaaaagcagacttaataaatgaatagaataggggtaatgtttccaagagagaatcagtatgggatttcaaacttgtattcataatgcctgggggctgtgtgccacggagtctaagaaaccacataagaattcatttttttccatgataagtcattttaaaacattttaatattagtaagtacatattttataataaagtaatacaactgtatttttttgttttttcaaaattcattaattgagattggctacttccagaaacctttgactgaaaaaatggtgcttgggtgtatttgcaaagaaacccaaggacttattagtgtattttcgttgtttttctttcatctccccattttcttttgactaggaaatgactaatgaagagaagaatattatcaccaacctaagcaaatgtgattttacccagatgagccagtatttcaaagcccagacggaagctcggaaacagatgagcaaggaagagaaactggtactacagaatttattaaacctctggagaattctggaattgtgattggttcatttaactttcttcttggttcttatgacacaacattaacatcagtaatttcacatcattctatgctaaagacttagagttctcaaagtctaaattttcttaaaggttttagttagactgaaaattgtgaacaagtactttgctcagtagctctgtacaggaatcttggtgcttcagtgacctaaaaaccagtcagtaactccagccaataatatagtaattaaggatgggcagacctgtcccacagtggctactggatattaaggatttaagacagatgaaatcatattggccatgtacctccctgctctttgatctattttactctggaatcttgtgatgctcatccatctccatcttccagccttggccatcctcattactgaaggatctttctggtatccagctgggatgtcatttttcttctacaggctgcctgtttttgtaaaaaaaaaaaaaaaaaatttattggaaccagctgcctctacttgtctacatattatctacggctgtgtttatgcaacaatgacagagatgagtagttgcaaaagagagtagttgcaaaagagactgtgtggcactcaagcctaaaatattttctatctagaaaaagttgtcagcccctgaactaaaggaatccaggctagaatttcatttttaccaatcggaagtccagaagttaaggattttaaggaattctttgcacttcaaattcctgtagtttcagtattttaaaggacttgcgtgtttacgtaattcagaccattgtattgatataactcattgtttcatggtacttatttggtcactagtttaaaaattaatgcattactataagaatgttaattgcatcagactttgtgtctcaggtaaatcttatcctcaatattccaagttagtgaaatttagtatattatttacttcaggggcattttgaaacttaaaagatcactttggagctttgttcttagaatattgatccaaagatagattttataaacatccccttgtcagagcctctgccaaggacacctgctgccagcaaggtctgaatctgttcccacccacaaggcagcacaacttagttaaactgaatcaataagtatataaaacgcagagtcaatagagggtaaggaggctcaaaatctcccccaccatccctcacctttttggagcaaggatcatagtatagagtgtatatacctgtatacctacaaaaaaattagtgacagatctgtctgagcttaaaaacccacgtttttaagctgtttaactgctgtttaattaaatggcttgagctattcttttatgaggctctatcagagactcttctccatttcctgttttgatagtactcagtaaaacagtatgaatttttaaagtacatttaaaaacacccaaataacatttacaaacatatatcctttaagacacaagaatcagttttgaatctagttgaaatcaatccttataggcagatctttttggggaattttatgatatttaagtttgagaaaaccactagaggttttcctttatttgaatttattttttagtgatttttcagactttcctctaccttgacttagtctcccacaagagataaaatgcattagtagagaacagcaatctgaatctattttgagtactttcttgctgtcttccagaaaatcaaagaggagaatgaaaaattactgaaagaatatggattctgtattatggataaccacaaagagaggattgctaacttcaagatagagcctcctggacttttccgtggccgcggcaaccaccccaagatgggcatgctgaagagacgaatcatgcccgaggatataatcatcaactgtagcaagtgagctcgcacttcatcctatgggccaaaaagggggtggagggcgtcctttattgtacttgggaatatttcccaggttacacaggactgtttgggaagggagatacttaagagcaggacagtatttcatgcgtaggtctccagatgtttttgaggtacagttgtctcccctcatccacaggggatatgttccaagacccccagtggatgcctgcaacttcgacccaattgctgtcacttggaacacatttctgttgatgtcttccacccccaaatttaatgtcttttccatgtttattaagtacttatcacatagagtggctataacttttgcagtctgaggcacaacagcaaaactagcacgactttctttttccttcttcacaatttcacagatggaaggttaattcttaccttagatcttagcaacttcaccatacagttttttttattaagtcgataatttccaccttttcatttaaagcactctgtgcagcttctgtatggcatatccaaattgccaacatcaccactttcacactttggggcctttattaagtaaaagaaggattacttgaacacaagcaatgtaaaaccattaaagtcaacctgataaataaggcagctactaggttacccatgggcaagtgacatatacagcatggtatgttgtatatatggttcacgcatcccaggtgggactacaagagatttcatcatgctcctcagaatgatgtgcaatttaaaacttacaaaatgtttatttctggaattttgtattgaatattttcggatgacagttggctgagggtaagtaaaaccatgcataaggtgggactactgtattgactgttaagaaggaaacttggaaaattatgctcagcagataggtccacttggggtcatgaaaggtgaaattattcctcacatcttatttcactatcctcgtgctctgttatttccagagatgccaaggttccttctcctcctccaggacataagtggaaagaagtccggcatgataacaaggttacttggctggtttcctggacagagaacatccaaggttccattaaatacatcatgcttaaccctagttcacgaatcaaggtaaggggatagttgagagctgcactggttcatggtgctgataacctttttttgttgaaatgtaacgttctcgtcctctagaatcactttgacaaattaaaaatcctccccattgaaagaaggcaagtactttcatagttagcattatggtgatcttcctacagtgcctccatttttttggtcacattgtaatcttatttattaattcacaaatatttactgaaatcccaaatgtgccccacacagtatacatttgatgctaggaattatgttggtaaacaagatagacgtaggccctgccttcatattgcttaacgtccagtggtcagaatgtgttgaagtatggtgattgtatattggcctctgcagatgtcttctacttcctcacctctcttggttatgagaagggaatgtagtttctgtatatcctgaaacaagttgtaaaatctaatgtcttacatacttctggcttcctgcagtctcatctgggtaggttcaccagggccaaatgaaatgtgtgtgaaagcacatcataaaactgtgttacatacctatgcactgttatttattgatagtgttattgcaaggagataactgccttgggggaaatcagtttttgtttgccagatagctatgtatatctagctttggagagtcccacgaacttcttccctccaacatactatgaaatataaacctaacagagacaaaaacacagtcaaggaattagttctatgtagactgttaactgttttatgtgcaggagacctgggactaaagaccttcttgatcctcgttcataggttataacatctgttaaaatgtgaaagccacagctgaaaaggctatgtgaataggcaagactaaactgtacattttctggcttgtagccctgtgttcttctgtatatcactacttttctaatgaaaaatacctgtttatatattttctccaattataaaatatacttttctggctgggtgtggtggctcaagcctgtaatcccagcactttgggaggccgagatgggcggatcacctgaggtcaggagttcgagaccagcctggacaacatggcgaaaccctgtctctactaaaaatacaaaaattagccaggcgtggtagtgggtgcctgtaatcccatctacttgggaggcggaggcaggagaatcgcttgaacctgggaggcagaggtcgcagtgagctgagatcacgccactgcactccagcctgggcaagagacttagactctgtctcaaataaataactaaatacataaataaaaataaaatgtagtttttgtagtttagataagtacaaaatcagaaagcgaacacttatgttgagcagactagtcatttaaagaaacatgtattcctcttctgaagtatcgcaaagctgtatatatggctacaaaagcagaaaaataatagttttagcccttaaggaacttataggctggtgggcaaatcaggtaagaattcagttgtattagaagaaagataaaagtaaaatgcattagataaacagaggagttatttgcagcaccttagagatcaacaataactttatgaagaaaagtaggttatggttgggtcttaaaagtagtatttcaaacaagagagaactgtgtcgtggacaaaggggagggtggtaagcagagtatgttgaggataggggttgagaaaaggtgtgataaaaagaattatcaagtggtgacagttgcacaacattgtggatatactactaaatgtcactagtggtaaatggtatcaatgcatattttaccacaacttaaaaatgatcaaaataacagagttactattaaaaacatttgcacataagttaacatttggatcttctaagcataccgcacatacatatactaatgccaccatttatagatgagtaaatttagtctctgggaggcccaaaaatttgcccaagattcagtggctagtaactctaacttagatcttcttagaatgtaacttagatcttcagtctctgcatgctttcctgtgacatccactgctaaatgtggccagctttaaatgccatgttaaagagactgagcccttaaaggactttgaacagtggagtgtcttgaacacagcttcacttcagcaagatttacaggcattatatgtaaatcacatcagtaaatatgaactgttataaatgctgcaaaggaaaaagtacagggtgccatctgagagtataccagggtacctgatccagcctctggggttcagggatggcctttctgaagaggtaacatttaaaggataatgtaaagaaaaaatttttttaaattagtacctgaagatctggctggcctcactatatagcttcctctcctgcctctttcttccctcagaacgaccaagctcttgctcacctctgggatttcaaaaggctactttattttctctattagaaacacccattctcctattctttccagggatacaatcctattcatcctgtaaatctcatcttaaatgttaactcttcagaaaggccatccctgaatcctagaggctggatcaggtaccccggtatactctcagatggcaccctgtacttttcctttgcagcatttacagcagtgtaaatctactggtgtgatttacatataatgcctgtaaatcttgctgaaatgaagctatgttcaagacaactccactgttcaaagtcctttaagggctcagtctctttaacatggcatttaaagctggccacatttagcagtggatgtcacaggagagcatgaggagcatacgctctaagaagattgaagagttactagctgttggatcttgggcaagttttagggcctttaagtttaaaaggaagccaccaacctgggatttaaagagggaaatgacaccagatttgtattttggaaactcgttacataattgatcattctgactgctgctctgcggagactggattggacacaaacaagaagtagagagatcaatgggaagctgttgcatactccaggcaagaaacagcgatgacttaagacaaatgatggcaatggggatggagagaggtgacagatacataatgtatgctgagtacttgtacaggtaaggattagagttaattaattgttggagcctctctgagggctgagatccttgttagatagaccaggtgaaatgcctcaagagcagagagccagtcaattttattccagacaatatccagctaactgctatacacaatagacatttgtgcaagtttctggatgatgatcatggtagtgaacctaaaagtcacccagagttagactctgaaccttatgctcaggagaaagtgcctgacttgaactgcaatgggatcccaataggagtcattaaaggcctggaaaagtggtgccattaggagaaaaagaaatgatttcttgagcttgctctcagttctcttttaggctgtcttgtactcagcagaatagtgagatcttcaaaggttggggtttgatagtgccttgaataatttttaactttatattgccagcggaagaagcattctctttttagatttaaaaaatgtagatacaaatattaggggttttatttttagtgaaacatttcaaacatacaggaatagataattatgtaatgaacactcgtatgtccaccatctggctttgtaaaatcttaaaattatgtcttatgtgctcaattgttttatttcataaaagatactgataaacatagctgaagtcacttgtataccattcaccttcttccctgtagattactatgaactcggtctttttattctcatacatattttttgtatttttgcagtatatttatgtgttcataaacaatatgtaattttacaatatgtaacacactagtaacatactaatttaaaacttgtttttagtttacaatatgttgtaaactattgtaagctaaagacatattgtacaacctattgtaaaataaaaacaggttttagttttaaattaggtatgttactgggatcattctgcaacttgtttattcctctccagctttgattttgtggttttattatcttaacctacacttttaattaatccattttatttgttacatggtattctattatatcataaaaacttatctattctgttggtttttgttgttggtcatttgagaccatgtcttcgctctgtcacccaggctggagtacagtggcgtgatcttggctcactgtgacctctgcctcccggattcaagtggttttggtgcctcagcctcctgagtagctgggattataggcgtgtgccaccatgcccagctaatttttgtatttttaatagagacgggatttcaccatgttggccaggctggtcttgaactgacctcaagtgatctgctcacctcagctgcacaaagtgctgggattacaggtgttagccaccataccctgcctctattctcttgttaagaggcatttagcatggttatacagtctcttgccctcataaacagtgctggaagaaacacatgtttcttgtgtatatgaatgaaaatttgttttatacattagatatttccaaattgttctcttaagtacttcagtttacatcattactctcctcctccctcccctcccacccccacccacaacagtattcctctttttccatatccttgctaatgtttctaaagttttgctttttacatttgggtcttagatccactagaatgtatttttgcattgggatgaagttgaaacctaatatattttccaaatgagtaaactgttgtcacagaactatttagttgtattacctcctctcttgtatatcagatatatctacatatatgtcagactgtttctgggctgtctgtcctctttaattagttcgtgtatctgtttctgcatcagtagcatactgtcttaactactgtagctttataaagtctattgagtaggacaagtttgtttcattcttcaaaattgctttggctattcttggccctctgctgtttcatattaactttcagataaacttgtcaaattctaatgaaaactgttgataaacttgttgattaacaaattctaataaaaactgttgagatttttattggaattgcaatacatttatagattaacggagaaagatattgacaatacaattgagtttccaattcacgaacatgttatacctctccattaattcatgtcttttgaatgtatccaccaatatggttttgtaattttcttcataaaggttttacatttaaaaaattcttatttttaagtgatcttatagtttttattgctaatgtgaatgagatttttttccattatgtttctgttggttattcctgaagtggtaatgcttataattttggggtgttggtcttgtatctggcagcagatacaagaggtgctcagagttgttcagggttgctgaactcttagttctaaaagtgtctgtcatttggggtttctatgtagataatttaattatctataaaaacagttcttcattttcagttcatatatttcatatttctttaagttttaatttttatttttaaacacaattatccataaaaccctaaccctttccctagtcaacagcagtcacagccaaatgttttattaattgctatactcagtgtttcttgtatctcataccttctggggtttcttgtcttgttgaaatacaccctttaatgtttctttagtgaagacccaacagtggcactcactcacctttgtttacctgaaaatttctttattttcatcttaattcatagtctgtcttttctccagtcaaggaagtgtcttatagggaagattctggtttcactatgctgtatccagggatatatatgtatttatagatagacttttaatctgaggactaatgtattttatcctacagtattaccaatcattatttcttccataacttctagaccattccttttgtacttcttttttagagtcctattagatgagtgttgacacttttcaatctagacatcttttttaaactatattttcatactctttgtctctttaggtctgattttttaagttcaggggaatatttcattttgggtgagttgtagcactcacttccaattcactaattctaattatatttaatctacaagttattccatctataatttatttcaattaccactttttgttttcaaaatttctaattttatatctgattttgtttcatttttgttttataatttcatgttctttctagattttacatctttttatgcatactaaacatactcacttgaaagtctttgtaagattgttctataaaatgttacctgaagtgaattcatgtgctaattactgttggcagtttttctgagccattttccttgtgtcttttgaaatttctgtttgtaagcccttttaactgggaggtgttttttgcttatgtactgttctcttttctttcccttcttctccttctctgttcattactttttgtcttggagggagtctcttagcccagctcagcccaagctaataaggcccctgacttcaagtccccccttcttgcatggagcaagaagtgatcctcctgtctcagcctcccaaagtgctgggtaggcgtgagccaccacatccagcctagagcacttacattgctacatatttggagcaaacataattaaagtatgacttactgtgacccagcagtcaataacagatatgtttttgtaatagaatgttgaagggtggtaactggtggttttacttcatggagggctttaggtcggctatatgggaagctgccatcatgatgcttttgttctacacatttctgctcagcctccagagatgtctcctattctaagagtcgtctttgtttactcttgtgtctatattttacttacttaattccctcacataatagtgtatcattgtatcccatctgtgctctatcaagaaatgtagcacaagcatgatgtgaactatgaattttcgacaatttaaaaaattaaaggaatcattcaggggtaaaaagcacaaagttgtagaacagctgaagtgtgttctttttatgtatcctgtctttgccccctttctggaaacttggattggcctacttgcagtcactgtcacagttacactacttctagcctcaaaggtcattgaaaggattgggatttttgagaaccacaataacacttgctctaggtactgaaaaggttgtcctgaactcattcatatctttttatgttcatcccagtttgtttttgcttttccccccaggattttgattacacagacatcttgcaagcatatttccattctttctctcccactctgtgcctggtgcccgtaggatctgaaatagcattggaatgacagctagccttctggaacctgcagtttcaaccaaagaaactctgattccagataacccaggagtttcttatcctgcataatctaggagtttacaaaaaggctgcttatgggtactcactgctaagtacaatccactgccaagtttggaagcattacctgctctcacaacccagggaaagtagcccttagtaaaattcaggttttttcaaaccagccttaaccttacaaacagaatttatcatcatgatttttctttcaaatgcagtacagcaaactttaggatcaatgttgacatcgtattgcgtttagtcctgttaaaatactctcagtgccaaatacacacttctgccttttttctctttagagtctagaattctgtggggttccaaaaatgtatgtgcttacaaccttttatatgtaaccacctagggattaaagggctaaatgtgaaggaaagtatctttacaatattcatcttgggaagctctcattttggtgagttctattagagaaaataagacacaagctcattaaaaatatatatatattctgagcctggcatcttggtataaaattcaaaacgttttaaatctatttattagtaagactaacatagacctaagtgtgaagactaaaatattaaagcttgtaggtgatatcatggttgaatatgaccttagagtagattccttaggacagaaaaacaccaacaagagaaacaattgactaaatggacttcattaaaattaaaaatttatgttcaacaaaagacactgctaaaataaatacagaatttacagactaaaagaaaatatttgcaacatgtttatctgaaagggcttatatccagactatacaaagaattcctgtagctccataataaaaaaacagacatcccatccgcataataaaaagagcaaaagacttgaacatatactatacaaaagaagatacaggaatggtcaataaataagcaaatgaaagagtgctcgacatcactaattatcagtggagtgaagatttaaccacagggagatacgaattccagttctaggtatttttacctcaagtgaaataaaaacatttatccatgaaaaaacttgtacaagaatgttcatagcagtgctctattcataagagtgcaaaactggaaacatcccagaatagataacacattatggtatagtcatagaatatactatatttatcagcagttaagaagggaactacttatgtattcaacaacatggatgaatcttaaaaacatggttaagggccaggtgcggttggtgcatgcctgtaatccaagcactctgggaggccaaggcgggtggatcacttcaggtcaggagttcgagaccagcctggccaacatggcgaaacaccgtctctacaaaaaaatacaaaaattagccgagggtggcgcacacctgtaatctcagctattcaggaggctgagacatgggaatcgcttgaacctgaggggtagaggttgcactgagccgagattgcatcactgtactccagcctggtgacagagcgagacgctgtctcagagggaaaaaaaaaagttaaaaaggcagacagaggagtctatattgtatgattctatttatataatctagactaggcaaaatttatccatgatgatagtaatcagattgaaggatcagtggttgcttggtggaaattgactgagaagggaaatagtcatgtaagaatactggcaaatgtcctcttccccattacaaacgtctgagaaagttactagaaaacagaatccaatttgccttctcacccccaactttgtaatcttgaatccagatcctgattccacccaaccactctgctgaatggatagcagctatattagagagacaatatagtgggcctactagttttaaaaagtcatccaaagaatgtcatctacaatcagttaaattagatttttacccattactgaagtgtgattgaattagggaaagaggagaggtggtcaaaggcagccttctccagtggattccttgtcttcttgagatggttttgtgagaccttgcctggaagacctaggtggatagtttattttctaaaagtagtcaagaaagcttgttcagggcattgaacactgcagggacaagcatacttcttggaggccagccatctcctgctggatctaagcggggtggcttctgcctccacctccatctcagcttatttgagagaatcctagatccttggtgcagaagcccagccagcctgtgaagaaaagttggtctggtagtatcctgtgaatgacgtgcgggttgggtttttctaaatctcgtttacctgactcctaccttacattccagtggtgtgactaaggaactgagcaaacgtaaccctaggggactttgagacaggctttggtagtccatgtgcactagagtgaggggaaagaggccactccagagttgggtactctactgttgaaggtgagccttttgtgtccaatttttccgtgcatgtgtaagaacagttgtcatggagatttactactgacttgtgcatgaggacagcttatatctcaccttttcttattcaccctgttaaatgtcaaaatgtactaagacttaggtattttttctgtgtcaccaactactaaatcacccacccatgatagcaggtagttactgaaactcttgtagccaaacaagtgcataacactggtacacatgatgtgagagtgcagatgactccttagcttaactgtgtaagcttttaatttctgagtacttttaggattgagaagtggaagacattcttgctctaggtatctcatgcttctgcacacccagaaggctggttgcgcccccaccccaccccccgcccccttttttttttttttgatagggtcatgctctgttgcccaggctgaaaggctggttatcttcaccacaggtcttatgtctcaaggaccacgggtccacgtcatagtcaggaaccaggcatgtgtgggcagaaatcactaccactttcctttgttgcgggtggggaaattaagagcagagattcttggattcttaaattccttctctatgtttatgtcatctagtctgttttatgctgttttatgtaattccctgcttctggatttcttgaatttttttccccttctcacttgtcataattggctcttgcttgtgagtctattttcattcagcttggtagcagaagtcttcttcactattgtttagattcagttttcacatggttttagtaacccttcattgggtttagaatcaacttttaacccttccaccaaaagctcttatttttttaaaggcttcccagaaacatagtttctctcaatctcatcaagaaatgcttttaaatgcagaagttagaaaatggtgaataattatggctgttcctggaagtcattgtgtccttagtaattacatgttgtagtctttggttctgcttctttgacagctccaccacactgtaatttaatggaattcacttagatttaatggaattcagtcctggtagaaaactgctattgggtcacagagttggcagcaaggctgtgaaattgatgtgggaatgggggtgattatgtgctttgtgttgacagaagttagtttttgggacatcccatgtgggtttttcccaggaacataaacattttagagaattagagctagaaactttcttctgggaaagccttagaagtcagttgtgcttggcagtgagatgggacaatgtgcattcttaacaggttaaatgtgccaaactctctcttcagtactattcttttttacgtttgcttaaggtcaagttcctgctcttttgttcaaagtcttgctttgtcacccatggtggagtgcagtggcgtgatcttggctcactgcaacctctgcctcctgcgttcaagcaattcttgtgtcttagcctccctattagctagctgggattataggcttgcgccaccttgcctggctatattcaaagtctgtctttactacactgtcccaaagtaatctacatttgggtttgggtctttacagggtgagaaggactggcagaaatacgagactgctcggcggctgaaaaaatgtgtggacaagatccggaaccagtatcgagaagactggaagtccaaagagatgaaagtccggcagagagctgtagccctgtacttcatcgacaaggtgagagcatcttcccatcggcattgtctagtgttgagcttaacaaagggagtttctgctctgccccaggccctgtgccacatactgtatatcacaactcaacatacatatatttgtatgtaaaactgaatcaaaagttgcacaaaacaatgcttagccttactgtgagcagtagattctgatctttttttaactctatttcattcctttagaaagttggttataacttataaaattgtttaaataaaccatgcaggtatcaccattatatagttttaaagaccacgctctagaggagatcaatttcttggtactcacgagaagaaaaaaaagttcatgtttttcccccagtcttgtattttaacataagttctgaattgtctcaaaattcacactagctttttgagtttgattgcccagagtagcagcactccctcatttgctgccttatttaattttttttttccttttctccatccctatttcagaggacagaatagaaagaaaaggagcatgaatatttaacatccctatagatttcatagtgagtgggggaggaagtaacactgcagaatccagagttcccaggccatgctgactgatgctgtggcttcaaacagaattgggaggcttctgttttggatgcctagaaattgcataagggtcaaaaggctgggcgcagtggctcacgcctgtaatcccagcactttgggaggccaaggcaggtggaacacgaggtcaagagaccatcctggccaatgtggtgaaaccccatctctactaaaaatacaaaaaaaaaaaaaaaaataaaaattggcgtggtggcgggcgcctgtagtcccagctacttcggaggctgaggcaggagaatggcatgaacccgggagacggagcttgcagtgagccaaaattgcgccattgcactctagcctggcgacagagcgagactgtctcaaaaaaaaaaaaaaaaaaaacacagaacgaaattgtgtaaggatcatgtctcttccattcatgctcatcttttctttctttcctgggcagcttgctctgagagcaggcaatgaaaaggaggaaggagaaacagcggacactgtgggctgctgctcacttcgtgtggagcacatcaatctacacccagagttggatggtcaggaatatgtggtagagtttgacttcctcgggaaggactccatcagatactataacaaggtccctgttgagaaacgagtaagttaatgtacctgtactgtctgacttgttttccattattcaacaagcatgggttgactgcttttttgtgtgctttgcactttgctgggcaccagcaaaagtgacttgagacaggcaacatggcacatgcctgtagacccagctattcagaaggctgagacaggaggatcactggagaccaaaagtttgaggctgtagtgtgctgtgatcacacctgtgaatagccactgtactccagcctgggcaaaatagtgagaccttgcctctcatattaaaataaataaaaataaatgacttgaaagaggggagaggtattatttgatatcttgtgtacctccttttagtcactgttccgccctgtgctaccttcctggtaaggagtggccttctcctatagcagtattcaatggagcatgctgtagaataggcccttagagcaaactcagcatatgatttaactatatcttagtatcccctggtcatgtggtacatttgtcacttttcatctttgctcagcctttctccaactcctgactgagtgaaaggttaatgttagtccccagatctctgagcccatcactgaagagggtactatagctctgtagtcccaacctaatcttttccatagtattgggcttgaaccagagacttacagtgtgcaggatcctaataatccagcccaccagcagtcctcttcttataaagacacctcttctcataaggacaccataatcagtaatcaggttttgctggctgtggaagtactctggacagattagataacagtatgtatcaatgtaaatttttgaagctgatactgtgtaaatgtaagggaatatctatttttagaacatacacactgaaatgtttaggaccatattataagtaagtacttataaatgtactttaggaccatattataagtaagtacttataaatgtactttaggaccatattataagtaagtgcttataaatggctcagaacaaacaattatgtatatatatctgtaaatatacacatggagagagtgagcatacatgcacactgtgcaaatgatgaatggggtaaaatgttaacagtgaatctcggtgacggatgtatgcgtgttccttgtgcctttttctttgcaagtttctttaagtttggggttatttctaaagttaggatttttttcaagagtaataattaggattcacttatatcttttaggtttttaagaacctacaactatttatggagaacaagcagcccgaggatgatctttttgatagactcaatgtgagtagatgaagcacacaatgttgaagggagtcccagccagagcctcacagtacctaaaggggagggttgctggcagatgacttgggctctccctttagcctggcctgctctgtggcatcccatacactctctcttcctccctctgagtccacggtgaatctgtagtcaagagaagacacatctgctgcagaacaactgctaaagcactcagggtggggggtagatgagccctaccttttatccttccctgctcctgcagagctttcccttcactgaatgcccagccacccctgctggagacccaaaacctgtccctgatatcttaatagggaaggaaaaatttgctttattggtttgttaagcccaccaacctgggccaggcttggtggcttacgcctgttatcccagcactttgagaggtcaagtagggcagatcccttgaggtcaggagtttgagaccagcctgggcaacatggcaaaaccattatccaggtgtggtagtccacacctgtagtcccagctgcttaggagcctcagaaggattgcatgagcccgggaggtggaggcagcagtgaaccgagattgtaccactgcactccaggctgggtgtcagagtgagaccctgtcatacacacacacaaagattgaaatacttcatagagaggcatcatgtaaccctgtattctggaattcttttcctctttccctaacttcccacttgtagggcaataaacttgacaagattgtgactgcactggcataaattactcctagggctgccagaaggagcaggtagtatagctttgacctaaatctgttgctttgtctcctccagactggtattctgaataagcatcttcaggatctcatggagggcttgacagccaaggtattccgtacatacaatgcctccatcacgctacagcagcagctaaaagaactgacagcccgtaagtattgcttggccagatagggcccacacccctactaatggtatccggtgaccttgcttatctaaggcctagagtcagttctactttttttccctaccattgtggtcagacactttttccctttagacctctagtagcgagataatgctttgttgtataaacataggatcaatgctgtttcccccttcccaccccaacttcaagattaatttcatggaatgctgacagcttttcacctgctacaaaaatgcctgcatttgtgttttatacatatattacttaaaagcccacagagtgaagacagtgctgtgatgttctgttaaattggagagagtaaagttgtcatggttaccagaaaaatacaggaacaagtcctttccttgaggtttctgtcatttttttcccataagagagtagatactttctatagctgatttttagaatattatcaccaagatccacgggctttttttttcctggagcccagtcactattgaatttccactgccctctgtaaatacatcagatggccttagaatatgaaccagaaaagccagaggtaggtatgttgagggtcagtattttaaggtggtataaagaatgccacactatacaaataaaaacaatttttttggatggcatttttaatttttctttttaaataagatactaccaggccatgtgcagtggctcacacctgtaatcccaacacttgggtagccgaggcaggagaatcacttgaacccaggagttccagaccagcctgggcaatgtagtgagaccttgtctctactaaaatttctaaaaattaggcaggtgtggcggtgtgcacctgtcatcccagctacctgggaggctgagcccaggagtttagggctgtaatgagctacgaccataccaccgcactccagcttgggtgacagggtgagacgctatctctaaaataataataataaccataataatactaccaactgtggcttaatttttttttttttttttttttttttgagacggagtcttgctgtcacccaggttggagtgcagtggcgcgatctcggctcactgcaagctccgcctcctggggttcacgccattctcctgcctcagcctcccgagtagctgggactacaggtgcccgccatgtcgcccggctaattttttgtatttttagtagagacagggttcaccgtgttagccaggatggtctcgatctcctgaccttgtgatccgcccgcctcggcctcccaaagtgctgggattacaggtgtgagccaccgcgcccggccaaaatttttaaacttttaacgtcccttcaattcctcgttctgttctggctacattgggtggagaggtggggaggtaggaagtggccagtatagaacttatgaatatgggcaacaaaccatagtaatatcagcagcacctatgatgagcatatgggtggggaggaagcaaggagatgaagggtccctagccaagttccctgagtaaaaagaaaggtgtagattttattatattacctagactcagagttcctcttgtgataggaatttacccaggccaagcttacatataaacttcctactatcattttcttaagactgttgactcaaattttgaccttagtccttgggggcaatttgaattaatcatctgagtaagataagagccagcaaaatcatggggacgaggcactgggggaagacatactgtgtgttcacttttggtgtacaaactgaccctcttgctaccatgttcctttctttacagcggatgagaacatcccagcgaagatcctttcttataaccgtgccaatcgagctgttgcaattctttgtaaccatcagagggcaccaccaaaaacttttgagaagtctatgatgaacttgcaaactaaggtatcttggataaaatgaagggaactgtgtctgctgtgggcagattatctgcgaatgagaggattcagggctgagatatcagcaggccagtgctgggtctgttgtagaaggtctatgctaaagataaacaaatggaaatatgatagtagttaatctctgatcaagatactgaatatcagagtatccattattcaagaaatctttattctacgcatagaagttctatactggccactccctattttgaaaaactaactttggtgtacattctaattgctaattactgtccttattgtacatgaggaaagtggatttaaagagagtcttcataattccttgctacagcccagaaatacagccatttccaaattagattgtttcaaattgaaaagatgatgaaacaattatatatttaaagtctttcaaatcctagcatagctatttttatttttacgcattccacatgaatcatatttttatatagttcatcatcaaacatctgttgaatactggccgtgtgccagacaacttgctgccctaaagggaaagactggtgtgcaaataggtgctattccttgtccctgagcctctttcctcctcctaactccgcctggtactgagcttttaaaccataaggcacttaacatttgatgatgaacatttttgtgttagcagtgacttcataactaattcatcctaacatggtggtccacagtgagaatttgcagatatttcattatagaacagatacacagggttaaaaaggaaacaaattatattgaaatacagttatcaaaatacattttaaagtccgataatagatgtgcttccttattaaggtcttgaggtggcctgtagtaaatttcaaggtagtaattaattaatatcaatgatactttaagatttctgcagcaattcaaatatgaaatgaagatgtctaacatctattgatgataaagtcataagtgctgctgctattactatggtttgttccccatattcataactgaagaagaaatactaaatttcagctagaagctgggtgcagtggctcacacctgtaatctcagcattttgggaggttgaggtgggagaatcacttgagctgagtaattcaagaccaacctgggcaacatagtgagaccctgtctgtattaaaaatttaaaaataaatataaataagttccaaaaagaggttattgaaattatagattttttctcatccaagttcatggaattctatacttgtacaactggagtttaagaactactactgtggaatgagactgcattttaaggcccagaatattttccatttgttgagatttccttaagataagtacccatgagtaatatagctggttcaaaaggtacacacaacttataatttatgctacagatgccatctggctttcttgaagagacgtacatgtccacagtgaatgagtatacatccatagacctttgattccttggatcatatgattggcaggcaaagaactctatagacggcccatcctagcagctcacatttgctgccactctgttaaatgctggtcatctggaattgtttattctcctcatgttatcattacaagccagaaataaaagcatgaatattcaggtgctgtttacctaattcaggaaaacccctcccaggagcatgaggaggtcttttgttgctctcgctctggaaccgggtttgggcagcccaggctgcctgccagatgagccctccaaacccaggattcctctcctgtgtgcccacaaagcaaacacacgcccctgtttgccaagtgaatcaatggagtctttgatgctttgagagaatttgacatagcctgccaatttagcattcacagaaatggttaaaagatcatggtttgctacatttctatcctaaaaagaatctggctagtggtgtctgtgatgcttttgtatatagaatcagtcccctcagtttggctttggacaacatagatgttggaagtaagccattcatagtaaaacatatttagtgatcctctcacaatggtggcctctgtttccaatcttgggctgtgtgtatctaacaacaaacaattccaggttcagtgagcagcccagtgtgtgtcagacatgttatttactccgtagaggttgtcttcacctcacatagatgaccataggtatggggttctcctgccctctgagtagcgtgagctcagtgacaggggctctagctccatgttgttatccactgctgtctctaagcaggaatctgagaagaacttagattcaccaggggtgcttcaaagattctaacaagcaagaaaggctgaaactgcccttgtctcttcccttatagatatggattccatgagagttcacatggggaaaaaagctccacagctaaaagtgttttcacatccattgagtgacaactaaggtccttcccacctcagacttctctcctttttttttgagacggagtctcgctctgttgcccaggctggagtgcaggggcatgatctcggctcactgcaagctctgcctcccgggttcatgccattctactgcctcagcctcccgagtagctgggactacaggcacccaccaccacgcctggctaattttttgtatttttagtagagacggggtttcaccgtgttagccaggatggtcttgatctcctgaccttgtgatccgccctcctcagcctccccaaagtgctgggattacaggcgtgagacaccgcgcctggtgaccgctctccttttaaaaacagaatgccaaagctaagccctgccatgtcctggtttgggacagactggctgagctgtttggcttcctgggtgtcttttaattgccagtttgtagccccttgagtactctcttcagtgcatccattttccttgagaagctggcaccgccttcccagagtactggtgggatctgaggaacgagctggggttgcccagtagatgcaagtatcctgcttcagtttcctaaagaggagctcctacagtgttcttagaatgaaagctaagaactggcacaggatctatttgataaacagctgtcatttgtagccatcctcccagatgtatgacagcagagtgttctctgatggaaagatcagcacccagattcccagccccagcgggttcctttccctgagcccctaggttactgccctgtaaaacccttgtttctttccagatcactgaagaacaaatagttgaattcactagtccttgtgcatcttctccctgccttcatgaagccacccttgtttttttttatctgacaaaccactgacagagacagcctggtccagataacatcttggtttcaccttctcaggtggagccatttttcctctacagctcataaccttaccactattatttcccctagattgatgccaagaaggaacagctagcagatgcccggagagacctgaaaagtgctaaggctgatgccaaggtcatgaaggatgcaaagacgaagaagtatgtacctggtattgtgaaagttggggctggtagagaaaagtgtgcagcatctgtcagggcccctggggccctggcttttcgatggtttctgagaaatgtcttttggaaatctctatactagggcttttattgactcaaagtggcaggatgggtacagtgtgctcttgtctagagcccaggcctggttcttgaggactttgctattcttctagggtagtagagtcaaagaagaaggctgttcagagactggaggaacagttgatgaagctggaagttcaagccacagaccgagaggaaaataaacagattgccctgggaacctccaaactcaattatctggaccctaggatcacagtggcttggtaagtgttgagccctccttgagctcctgctgctagcttaagaaaggtggagggggttccgagagcactggtggccttcacatgccattcctaagctacacactttagtcctctggggaaacttctggcttcagctgtgtacaagttactctggttgctgaaccttgtctgtaaatgcattgcaacattctggttgctcctaaatggtcagtgctgttacactgccttgtagtgtatatttttaagaggcaggtgccatccctattcctaatggaactttaggacaggaatggaaactcttagcttctggaagaataggaaagagcccatccatctctacacttcaacaaaacttttcgttgaatttttttgcagttgaaggtaggaacaagagataaagatgagaatacagatctgagcaacttacacagagaggcagagggacctttaacaaaagcagataaatactaggtttctctgtgtgtcacacacagtgtcacataacatctgaaacaagtggctttgttatggaagatgtttagtttgagctgttaagttctgagcataggtggagatatcctcccctatggcacttgctagtccgggctaaagtttccatctaggtcttttgtacctctttctgctcgttttgccttgtttggtgctagagatttggttagctcttaaaaggcaatatagtatagtggttaagaacatggagaaaaactgcttgggttcaaatttcaggtcacttaccagctagctgtgtgagaaaatcagtaaattacctaacgtctctgcctcagtttcatctgtacgtttttcacttgtacatctgcagaagcacctactttagagatcactgccaagattaaatgagttgatcacataaaacctttagaacatgcttggtgcactattaatttgcatcctcactagacagatgtgaaagagaagatggaacatctgaccctgggcctcagatatgggccattgctgagtcaccctaatcccccccttatttctcctttgtttgcaggtgcaagaagtggggtgtcccaattgagaagatttacaacaaaacccagcgggagaagtttgcctgggccattgacatggctgatgaagactatgagttttagccagtctcaagaggcagagttctgtgaagaggaacagtgtggtttgggaaagatggataaactgagcctcacttgccctcgtgcctgggggagagaggcagcaagtcttaacaaaccaacatctttgcgaaaagataaacctggagatattataagggagagctgagccagttgtcctatggacaacttatttaaaaatatttcagatatcaaaattctagctgtatgatttgttttgaattttgtttttattttcaagagggcaagtggatgggaatttgtcagcgttctaccaggcaaattcactgtttcactgaaatgtttggattctcttagctactgtatgcaaagtccgattatattggtgcgtttttacagttagggttttgcaataacttctatattttaatagaaataaattcctaaactcccttccctctctcccatttcaggaatttaaaattaagtagaacaaaaaacccagcgcacctgttagagtcgtcactctctattgtcatggggatcaattttcattaaacttgaagcagtcgtggctttggcagtgttttggttcagacacctgttcacagaaaaagcatgatgggaaaatatttcctgacttgagtgttcctttttaaatgtgaatttttatttctttttaattattttaaaatatttaaacctttttcttgatcttaaagatcgtgtagattggggttggggagggatgaagggcgagtgaatctaaggataatgaaataatcagtgactgaaaccattttcccatcatcctttgttctgagcattcgctgtaccctttaagatatccatctttttctttttaaccctaatctttcacttgaaagattttattgtataaaaagtttcacaggtcaataaacttagaggaaaatgagtatttggtccaaaaaaaggaaaaataatcaagattttagggcttttattttttcttttgtaattgtgtaaaaaatggaaaaaaacataaaaagcagaattttaatgtgaagacattttttgctataatcattagttttagaggcattgttagtttagtgtgtgtgcagagtccatttcccacatctttcctcaagtatcttctatttttatcatgaattcccttttaatcaactgtaggttatttaaaataaattcctacaacttaatggaaacttaagtgtctgcctctttgttacaaagggcctcaggccagagttggggctgggacttagtgtgggatgaggtctcaccactcaggtcagcaagagtagattcctcccaggagcagatgaggcagggcctggcctggaaaggagtgttgtgtgcctgtcctgctgctgtgggtgtgggttaaagaggatccaaagtccatatccttagataaaagacaggaaaggaaggaagggtgcaaaaaatccacagtaagaggtgtggtgcaaagacagcatcggaggcctagcgtaggtaaagtatattgagcaggatgttgcagctgtatttgagtcaaaagttttggagagctttccatgtgtactggccagaagcagaagggagctgctttaggttttttcacgtggctaagcttacaatcaggatggggagaattaaggttccagatcccagaagccccttcccacatgggatgcaaacttctccctgcattgactgcttaattgaaaaaggcagtgtggtgtggtctctgaccactttctggtgctccagttaccctagctggctatggtctctacaaaaattgttcctttgctcatcctaaattataggtaagtctggaattcagaatgaaagtgaggtctctgtctaggtcaaatggactgcagggagcaggaaggccagaagggtcaaaattggtaaattaatggaagggccctgggccctctagcttgttagcacgagcaggtaggtgtcttcggggaggcgaacccatagtctctgttctccctgaggctggaggcagggctggtactaggcccacaacagagaatcctggaggtccttggcagcctgtatttttattaaccagtgaaagaggcagcattcaccccagggaataagggaggttatgtagccatcactgctttggagcagagagactccagccaggtgtttttgaattctgtgttgaggtagctgggccactgaatgtagggaatacaacagagaggctcttttggtacccatttgatacactgtggctggtaggtaagtaggttggtgtaagtggacctcagatgccacagctaggggacaacctttggtccaaaactagaagtcaggtaaggaggccttgcaggcagaagaccttgctgatgaacaggaagtaatgcctacctctctggcaaggacctctcttgcaagtctgagggcagatgctgggcaacaagatgctgctcaacacaactaagaagggcatcccagacagtggcagcaggcctgggagaccaaagccagagaatgggaagctgacctggccactggggatgaaagaagaggctgaacaggtaagtgggggccagatgtaaaggaccttgaaggatgcttaacccaggagtcaagaataaacttatccacttgcctagtccagtaggttttacttccagccacgtccaagaacaggccagatgggcagggtctgagaaactccctcccatcaggcctttctatgatgcccgagttcggtgtgggcaaagggcttccacgtgctacccaagccagatatctctgtgctgacttggcttttctcctctcttacctcaccttcatctcccatcccccaaatctggccagcaagtcctgtctctccattctccctgccaaaagctgtcaaatttcagacctctgctacattaaaacatgaaaagtaaaaaaccttcacaaccctcagccctttccagccactacctttcccttttttcccaaacaagcacctgcaataagtcatcaccatccagtcattcccccacccactgcaactagcttctgtcccatgagcccacaattccttctcttcactctgaccaatgtcgccaatgactagataaccaaaccaatacatgggctctccattctgcgtcttagagtctttgtggcactggacactgttgaccactccttccatcattttgagggtacgatgatttttagcaactttgctgagtggtgcaactattaaccatgtcagttttagaacattttcatctccctgtaagatcccttatgctcatttacagttaatccacattcccactcccggcctccactaacctttctaaatttgcattctgaacatttcatgtaaatggaatcattcaataggtgaccactaccttctctctgattttcacaatgccaccctctcctggttttactcctgtccctatcaggctttttctgagtcaccttttctatcaggtcctaagtgccatgattcttacttcagcatagctgatttcatttgcacctaaaggtgatgacttctctttctctctagcctagagcccttttctaagctccagactcacattatcaactacacctctgcagggcatgtctacgggcacctcaatctcagcgtctctagaactgagctcagtacccaccaccccaagcctgttgggcctgggcttcacatctcagggaaaggcaccagatcctctgtcccccaacccagaaactagggtagccaccatccttcactcctctcgtttccacacccagtaaattactccaaaatcatctcctcaataccataaaatttattttctgaaaaaattttactccttagaaattcttcaaataatgagacactatcaacttgttttgaaccaaaaagcactttttagagaaaacacattaccctgaaatgacctcagtcaggccagttttggatgcttataagtagtcccctgacaaaaatcagtaaacaaggagacaaagaaatttaacacagacttagtaattttcacaatcccaagaattccattcagacaagcctcttagaaatcactaaatagcaaagacttttttagattttataattgtactgtgtgtgtgtgtgtgtgtgtgtgtgtgtgtgtgtgtatacacacacaattttttttttttttttttgagacggagtctagctctgtcacccaggctggagtgcagtggcgaaatcctggctcactgcaacctctgccgcctgggttcaaaccattctcctgtctcagcctcctgccaccacgcccagctaatttttgtatttttcgtagagatggggtttcaccatgttggccaggctggtctcgaactcctgacctcatgatcttcccgcctcagcctcccaaagtgctgggattacaggcgtgagccaccgtgtctggcccacacaaatgtttttaaaggagtcttttaggccaggagcagttagctcatgcctgtaatcccagcagtttgggagaccaaggcagaaagatcacttgagcctcggagcccaaggctgcagtgagctatgactgtaactgcattccagcttaggtgacagtgagattctatctatacacacacacaccacacagtcttttagaaaaattgagatagtaatggataataagagttgaggtttgggtcaaaataatatgggaggggttagtgggtagaatttggcatgaaacaaaagtggccaccaattcattattgaagctagatgatgggtatgtcggcattcactatactatacacgtagacacatttgagatttttctttttttttaattttattattattatactttaagttttagggtacatgtgcacaatgtgcaggttagttacatatgtatacatgtgccatgctggtgtgctgcacccattaactcgtcatttagcattaggtatatctcctaaagctatccctcccccctccccccaccccacaacagtccccagagtgtgatgttccccttcctgtgtccatgtgttctcattgttcaattcccacctatgagtgagaatatgcggtgtttggttttttgttcttgcgatagtttactgagaatgatgatttccagtttcatccatgtccctacaaaggacatgaactcatcattttttatggctgcatagtattccatggtgtatatgtgccacattttcttaatccagtctatcattgttggacatttggcttggttccaagtctttgctattgtgaatagtgccacaataaacaaacgtgtgcatgtgtctttatagcagcatgatttatagtcctttgggtatatacccagtaatgggatggctgggtcaaatggtatttctagctctagatccctgaggaatcaccacactgacttccacaatggttgaactagtttacagtcccaccaacagtgtaaaagtgttcctatttctccacatcctctccagcacctgttgtttcctgactttttaatgattgccattctaactggtgtgagatggtatctcattgtggttttgatttacatttctccgatggtcagtgatggtgagcattttttcatgtgttttttggctgcataaatgtcttcttttgagaagtgtctgttcatgtcctttgcccactttttgatggggttgtttgtttttttcttgtaaatttgtttaagtgctttgtagattctggatattagccctttgtcagatgagtaggttgtgaaaattgtctcccattttgtaggttgcctgttcactctgatggtagtttcttttgctgtgcagaagctctttagtttaattagatcccatttgtcagttgtggcttttgttgccattgcttttggtgttttagacatgaagtcctgcccatgcctatgtcctgaatggtaatgcctaggacctcttcaaggagaactacaaaccactgctcaatgaaataaaagaggatacaaacaaatggaagaacattccatgctcatgggtaggaagaatcaatatcatgaaaatggccatactgcccaaggtaatttatagattcaacgccatccccatcaagctaccaatgactttcttcacagaattggaaaaaactactttaaagttcatatggaaccaaaaaagagcccgcatcgccaagtcaatcctaagccaaaagaacaaagctggatgcatcacgctacctgacttcaaactatactacaaggctacagtaaccaaaacagcatggtactggtaccaaaacagagatgtagatcaatggaacagaacagagccctcagaaataacgccgcatatctacaactatctgatctttgacaaacctgagaaaaacaagcaatggggaaaggattccctatttaataaatggtgctgggaaaactggctagccatatgtagaaagctgaaactggatcccttccttacaccttatacaaaaattaattcaagatggattaaagacttaaacgttagacctaaaaccattctttttctttttttgagatggagtcttgctctgttgcccaggctggagtgcagtggtacaacctcggctcactgcaacctctgcctcccaggtttaaacaattctcctgccttagcctcctgagtagctgggattacaggcatgtgccacttgtaatgctaatttttttgtagttttagtagagaccgggtttcgccatgttggccaggctggtctcgaactcctgacctcaggtgatctgcccacctcagcttcccaaagtgctgggattacaggtgtgagccgctgcacccggcccagccaccgtacctggccaagatttttctttaaaaatgtcttttttatttagacacagggtctcacctctgttgcccaggctggagtacactggtgtgatcatagctcactatagccttgaactcctgggctcaaacaatcctccgacttcaacttcctgaagagctgagactacaggtgcatgctaccatgcctggctaatttttttatttttatatttttagagacaaggcctcactatgttgcccaggctggtctccaactcttggggtcaagcaatcttcctgtctcagcctccccagatactgatattataggtgtgagctaccatgcccagcagagatttttcataacatgtttaaagcaatacagtaactggttattttgaagattattagtatatatccatagaggaattgaggggggaaaagcaacatcttaatgttatactaaaaggtaattatgcttaggttacaattttcagtgataacatcacatactaattcagaaagtattccctttgcagcaacatggatgaatctaaataacattatgctgaacgcagacacaagagtacatactgtatgattccatttatgtgaaattccagaataggcaacactaatccgtagtgacagaaagtcaatcagtggttgctggatggggacagaggagactgactgcgaaggcgcaccaggaaacattttggggtggtggaaatattctctatcttgattgggtggaggttacatgagggtatacatttgtcaaagcacaaattttacacttaaaaatggatgtattttatatgtaaattattcctcaacaaaaattattttttaagtaaaaaaaaaatctaagtaaaaaaagttggccgggcacggtggctcacacctgtaatcccagcactctgggaggccaaggtgggtggatcacctgaggtcaggagttcaagaccaccctggccacggtgaaaccccatctctactaaaaatataaaaaattagctgggcgtggtggtgcgggcctgtaatcccagctactcgggaggctgaggcaggagaatcgcttcaacccgggaggcggaggctgcagtaagccgagatcacaccattgcactccagcctgggcaacaagagcgaaactccgtctcaaaaaaaaaaaaaagttgtttgctctctctctcaacttagaagggagggaaagtgatgatatgctttgagagattctattagatgactcaaaaagcgactcatggtgaaaatacagaaatccaagattcatgtgaagagttgaatatagtttactgaaaatgtgagtgtggggaaaatcaatgttcgtgaatcaatatattgttttaaatatgtgatttaaagtatgtacctgtagctaaataaactattatatgtggacatttgcatctctaaaaagtttatattttagttgcaaaaaaaaaacaacccacaaaacaacttggagtgaccctatgatgaaaatgagtgtttgccttgtatctggagtggccatctctttcaggcatatacagtctctcactttgctctatctccacagacactaacaggtttcagtaaagccaagtgtcccttctcagtgctccaatggcccccatcacactgaattgtcatggtctgttggcatttctgtacccactgctggagtgggaacttgttctgactcagctgtgctgtcttagtgctctagaggatgcatccgtgaagcgtgttgcaaggaggagagagaaaaacagaaaagtgcaggtctgccctggcctgggctttccccttctcttcctttattgccatatgttgcctcagtgatgcagtcacagtgtccctgccacctttcagaagaagatacatctgcagcccagctggagaacctcaacatctgggtcccactatgggggccaatcagcagagatacaccaaggtcaatggagacagcagtccctgggagcagccgagccaggtgtgattttgccttgagagagaacacgaggctcttgagggacagataacacaacccaggtgaggaggaaagcaggtggacatgacctaagaagtgtgaggcctgatgactaagttggagccacagatagatttgggggccaggggtcaggagcctaaacagcaggttgtgggtggagttcaaggtgcactgaggttagttcttagcaagtagtactggctgtgtgctgaggtgcaggctggctcacaaacccagaggaggggctgttcagatgtctaacacgagaaactgagtaaaaattaaagaatggtttaggccaggtgcagtggctcacgcctgtaatccctgcactttgggaggctgcagtgggtggatcccctgaggtcaggagttcgagaccaacctggccatcatgatgaaacccccgtctctactaaaaatacaaacaattagctgggcatggtggcacgcgcctgtaatcccagctactcaggaggctgaggcaggagacttgcttgaacccgggaggcagaggttgcagtgaaccgagattgcgccactgcacttcagccaggacgacaagagtaaaaaaaaaaaaaaaaaaaaatggtttaaagaaaaaggacaatgttttacacatggatcaaattagacactgcaagactataaatctgcacccttctaatgtgaaaagggcttcactgagctatacttgtatattatgccctcgatattcactcaaggccattacaaggaacaaatgaaaacggcatcagcatttgctattaaccagttgagaacattctccactatttcaactaaataagtatccaggtgagaaacttcttttataatttaaccccagaaattttttttactccaaagaaccagttaacagaatagaaagtgttattgttttggctatcaggaagctcagccatgtttaattctcaatcacatcagctacattaacccataaaccatattatcgtcctcctccttataatctcatctcctatttctatattttattctctatttttaagtactcaaaacatttttaaagggctgaaaaagaatacacttgtggtagacatagcaacgtgccacccagatccccttcaaagaaggacttgttgacccaactattgggagagctgtcagcagaaaatcttcagctgtcagcccctcgaagatcatcttggctgcagagtgccatctggcccaggctaggctcttcccaggacattacaactcctttccaggctagtgccagacaacagagatcctgggagttggctgagactgtcatcaggcctgcatctcagtttagttttccctgtgcccactcctgtttctttccagtacctcccagagtgttgatcccagggccactccccaataaacatactgcacactaacctgtcacagagtccacatccaaagaacccaacctgtgacagcaccaaatcaaaagagactcaggaggctgaggcaggactgcttgaactcgggaggcggagattgcagtgagccaagattgtgccattgcacgccagcctgggcgacgagagagaaactctgtctcaaaaaaaaaaaaaaaaaaagagagaaaacatatcaggtaggggtattttacaaaggagagaggatatacaataaagtgttcatacatacatgggaagcaaaacagcactgactctggggccagactacctgggtttgaatcctgccttttagctctgtgcctcagttttttcatctggaaaatggggataataagagcacttatagggctgtaatgaggaagaaatgagacaatgtggataaagcagttccatagtgtttactatatgtcaaccactgttctaagtggtcatttaataaacagctgtgaggccaaacccacaggtcccgaggggcagttgggctgggactctccccagactctgggcatgggcacaggtacagtgtaggccagggcatgctgaagcatgcatgttcacagaaataggcctgagcagggctagcatgggtgacgtcacaggcgtgtgcttgtgtgggtgctgggctgctcctcccagacagcgcagctgcacgtattgccattcacacccacgcacccatatatatgctgagctgggggaagcccacacagaccacaccctctgcatgccctgtttttcctgcacctcctttggtggaaggaggcacctgaggcctgggatgctggcccagaagtcccaggaggaaatgggtcctgttccctgattacaggcctggcaacgggctgaaaactcaagctcttgttggcagggatttcttgagcccctagaggtccagacccagaggcaaaagtaaaagcaaggaagccttaccctgcatgttaggaagctcccaaaaaaatggagaaacggatgtaaaaagtgcatcagagcccacaggctgccggagtcagcacagtaagctcaatgagggctgcagcacttaagagggtgcctcctgtacaaaacaggatcagacagccagagaggggccccattcagcccccgtctgccttcctggtctcatcactccctgtcccctcctcagtcaggaaactctagctttgtaaccctaaattcaacaacctcttcctggcctcagggcctttgtacatgctgttacctctacttggaatgtacttttctccaacccacctttaataattcacctcgccatcgactcacttcctttagacctctgctgaggtctgaagagatctcgacccaatgtttttccttctagccctcatcataattgtctttatgtaacagagtgtttatttaatgtctgaactcccagagagctggcgctgtgtctctcttgtgctcctcatgttgtcaatgcccaacacagagaagagcagggtccacagaacttcaagcctaagccagttcaagccacactctgtgagcactcacgttctgctggattccctgtgcccaaggccagcggtgagcatgcctcccctcacccatgctgattaaccagatagcctccatgcccactgactactgaccaccaggacttacctaagccagtggatctcctgtgaggcagaaaactcatggagtcaggccgacttgggttctagttcccacctagtcatgttatgtggctttggggcaaattgtagaacttctctgaatctctgtttcctcatcagtaaattgtggaccatcattcctgattagaagataattatgaggatcaggtgtgaccacaggtgcacaccttcagcacagggtctacgctagctccgtcccgcccacgtaaagacctgccactaggtggcagtccatctcagctaccccaccgctccttactccacagaggctggctaggacaaagggtctcaatgtcatgctgaattctgagcttcttaggggacgcacttgaggaaatcaacgttaacacacaagtttccactacagcaagacaaagtcagaagcagcagccccaggtcactatccagctgagtgggttgcctgagcacacgctcttacaaactctagtctagtcctactatctcacaattcccaggaagcctggctctttctctggcatcagctggaagctctgttgggcttctcacctctgaaatgcagtaagttgtcctgctgtgcctggcagccgacccactgcctggctcaacatgtcagacaggctccaccgcgaccgtgggtgtcctcaattttggcggtgctgacaagggtagatagattgcaggggtgagtttcaagaatggcttcagaaagacaaagagtatgaattatattccataaccagaaaaaggccttgtggctggagaatggagagtgaaggatcacttgtgagagatgaaactggtgagatgggcaggtcatatagaacctgctaggccaagcagggagtgtggattttaggtgcaatgggaattcacggagggttttagcctggatgtaggggatcatgatttaatttcattttaaagatttaaagcatgataaatccaggcaaaaccaaactgatagatccaggcaaaaccaaacaaggtgagtagtctgggtgacaggagatggggccttcagcttgtgggctgagtgacaaggtcttgatggattggaggtgaggcaaagggaggaatcaaagttagctgcaaggtttttgaccttccaacttagagaagtttagcgccgcgttctgagaaagtgaagactgtggaaggaatcgtttggggagggaaggcgagctgtctaagggggggggatgtggaacatgcagtgggatgctggggcctggaacgtaggggagatgcaggtttggagtcaccggtgcctgtgttgttgggcaaagccaggggaaaggtcaggtcgccttgggatctggcctagcactgagtgcagaggaagagaagcttctgagatcgagaggcagcggctacaggaggaggaagaaagcaaggcggggaaaaccaaagttcaggagagcatttgcaggagggcgctgcggggtagggtctgagtcggagccccgaatcggactcgagtcctgtcgcgtggggacggagcgtgcagaggcccatgcgagggacagacacaaaggccctgggagctgcaggtcagaccactggacagcgcggccgcggacctaacgcccctgtaaggggtgctcacgcttggggggaactctccgaaagagaggaccactgaaagccaccctggcagcaggggcggaacagacagacgtgggtctggccgtcgccagaactgcctgcggaccagccccgcgctgccgggggggcgggacatgtcggctgtccatcagtgcccgcgaccaatccgcaggcagccccgcccccgcccctcccgggagagggcgcgcggaggacccgccgccgccggtgtgaggcggcccgtcctggctcccttgtccgggaagcccgcccaggtaactgagtttggccgggcattcccggaggacgcgccatcccctcacgtcccgtcccggtcgctgcatgggcggtgttcgggacgcgggggctgcgtctgtgcgggaccgcggggtagcggccgcccgtgcgagtacgcctgactgacgcgccggccgccgggcctgcggcctgtgggcggggctgccgtgcgtgacagggccgctcgtggccgccgggctgtgtccggggccgcgtgagaaagctctgcgggactgagggctgggtgggtcgaccgggaacggcgcgcgctcccgccgccatcgcgcctccgtccccgcctgcggcctgtctgggggtcgcggggcgcaggcgcggcgggccgacgggcgggggtcctccccacgggtgcgcgggcgcctttgttcccggcgccgaagcggggtggggcctcagggcagccccgccccgccgcgctgaggccccgccccgtgtccgcctgcaggagccgccgccgggtcccgctcgtctgccgcctcagcctcagccccaacctcagccgccgccgttgcgcttgctcccgggcggtcctggcctgtgccgccgccgcccccagcgtcggagccatggcgggcgccgcgtccccttgcgccaacggctgcgggcccggcgcgccctcggacgccgaggtgctgcacctctgccgcagcctcgaggtgggcaccgtcatgactttgttctactccaagaagtcgcagcgacccgagcggaagaccttccaggtcaagctggagacgcgccagatcacgtggagccggggcgccgacaagatcgagggggccagtaagtgcgcccacttcctgcctgggcccgccccgcgcgggggtcgtgggagcccggcccgactgcttgcaccccggccggccgccccagcgacttgggcaaactttcgggccctcccagactccctccgggccccgcccccgcttcgtctcgggtggtcactgggggcggggggcatccgggtcctcggtcacctgacaggacaccccccctcccccagctggggggagtgttccaggcgctttgccctgaggcctaaaaatcctcgcgggctggagacctgcggtgcaggcatcgggccccccagaccctgggagtggtggcggcgtcggcgaggggagctaaggcagtggcccccaccctgcacgggaacctggggcctgaccagacggtccccgcccactctttatccagaaagagcagtctgtgaaactctccgggcccccaggctgggctcttatttgcaaaggaatctttgggttccctaagtagaacttaggcagatgttgggtagggctggtcttggagcagagctgggcctactcatctccctctgggggagagggaggaaggtggtcttgtttggtttggagaagcctgagagaagccagtggctggaatttttttttttttttttctgctacttttgtcccaaagctgggttttggaggcctatgtgggtgggcagacactcaatgccagggcagggactccccttgccctgggaagcacgttcccaggagatgggccccataaaggcctgccccagcgccttggagtcaggtattcttctcaggagtgcagctagtttgtgagtctagccctttgtcctctgtccggtggcttcagggagcgggagcggcttctcttagtttcctgccttttcgccttcccaggcctgagcttggctgcttttgcgctggtctctagtgggaggagggagttgggggattttgaaaaaccccagatctttgagagttgttccacttagcgcgtgcctgtgctgtggtcggatgggcactctgctctgccctccattcccccgcctctcagtgtgaagagatggtgtgtctgcaactctagactgggttgcttcttgcagggacccccggagactagggttagagagacccaggctcagaaccaggtctgtgtgaaggagggagatcaggaagtgacaccccaagggggggtcccacaaaccttcttgggtatggtgtgcatgtgtgtagatagttgaggagattgggaggaaggaaggtcttgtggtgaggcagccaaccatcctcagctacaaactccagatctgacacagatctaatgcagctgctcaacttagaaatggcagcccccttcctcagtgcccccactgaccctgtcagccattgggagaacattttagtgacttgagagcctgtggattccaaagtaaaggaagaatcgacactgcaaagagctgagataaccctgggaacatcactcaggcatcaggctccaggcatggtccccttccttactccctatgctgtgttgagttggtggcactggctggaagttctcagagatctcctgggtaacagactgcattttaaaccacgcatattagcaggcaataaatgtagcacagtggttgatggcaagtctggatttgaagcccatatattcattgtgtgtttcccggccagttacttaccttctctgagccttgatttcctcatgtgtaaaatgggggtaataatatatccagtatatatggttgctccaggatcaaatgagacaattcatataaaacatctagcattgtctgacacataaatgtttaataaatatgagctgttattagcaataacattaacaatagaccgtggctgcccttcaagaccctgaactgggaatggtgagggggtgaggtgtggctataggtgaggatgaaggtgcaggaagggaggaggacggtgaccaaattcacatttcacttagattgctactcagaaaaaggcaggaaacagttttgttttgccccaacccatgtgcccactcacccacccaccatgtagaacagtgtttctgtagagaaagtgtttgcagttgtgcacatttgactcctgggtgtgacctttcttgtttgtaagttggggcctgaacagaaaagaggggtgcagagaggggatgatttatcatgcctcatgtatttgggggatggaggcaggcatacagaggacctgataaccccctacccaggggtgagcaggtgggtcagccagaggtgtacaaattcagtgatctcatcagttagctgggatttaacaggcctggagagtaggcagaggatgtaggaggaccctggcttttggattttgggggctcagattgaaaagagcctggatgaaaagtctggtcgatgcttgtgtgttcagacttaactaatggaggcttccactgaagccgtgccctgcttctacccattcgtgggctctccttgttggtgggttctgatccctgcggcctctgaggaggttggactgccagccgggttttctgccacctggactcttgcccaagcacctcaggtatctggcctttcctgctgaccctaccagggtaccagcagtgcctgaagcctggcctaagagagagacactgtgctaccttcagggtgttggtagacctgagggagagacagtgtggtttaaggagcactcatactgatatgtaagaccttcttctgccctgactctgtgccctctcttgtcagcagttgtgaaatggagctgacacctcctgatttctagggtggtcatttggctcaaaagcggggtggggaagtgcttaggtgttgacaagtttggttgtcctggtggtatgacaggaaccaggttggtgtttggccttttatgttgcagatactgacataaatgaataaaatgcagttatgtagagttccagctgagtgctattgagacctttcgtcccattttacagatgagcaaatggaaatggagaatcgtttgtgcccaaggtgttgtgtcagtgtgtgccagggcctcagctggggccagctcactagtcagaggctgactagcaaccccaagcccatgttccctgtggtccacgtggctcctctgtgagacacctttgtgctcagaccatgcattacagggcaaagaccactttggcttttgtatcccaagacagcctcagcctctctaggctctggctccacactttttcttctggtgttttctgagttgagatggttcagactcgtgtttaatgaggttgtccatttgagggtctttgtgggcccagtaaacactggtgtagacactgtggaggtactctgaatactggctgagcatgtccatggggacttctgaggccccaggcttctgtctttggctgatccttcactagatacttttctagatgccaggccctctgaggtgaaggagtatgggtgcttgcttttagggaaatgaaaacaggcaatgacaattgtgagcagtacctttgatgaagagggtgagggtggcggaagaaaacagctaactgccttgatgaggcaggcgggctcagaagggaggtagtagtggaaccagctggctggggcttgacccctgtggctggggagcagaccacaccaggaggcctgctccgagggctaggcccacagcacgggagagggcaaggcccaggccggtgtcatcaagggttttctttgtactggctgttactcccagtgggagaggggcaggagcacatgtccggatctccagagctagccatccctgcctgtgtatttcctgtctgatgtagttttttccaagggaagtcagaccttttagtgtttcctcagcaccccaggcttgccccgatgtgtgggtttccaggcccccccgcccagctgggatcctctgtttcctgtgaacctaggaaaagggcctgcttcacagataactggaggagctgagcacacccagtcctgggacccacaacacctccagcttctctccagactcttgtgtgtgtgtgtacacagatgcacaggattcagttggagtttagagatcttggctaccagctttgctctgggtagcttcttggaatgaggcacatttattaatatttgcaataagtattattatacctccccatttgcccagtgctaggcaccaaggattcaaaagtttattgagacatggtttgtgccattgatgaactcttggaaaagacagatgtagaggcatatgattataaccctgtgtgttacataccataatataaaggcctctaccaagaactgtgaggagctctgccaggaaggcattaaaggagaggtgacctttgaggtaggccttgaattactgaggcacctgtctgtgccgaggctaaggaactgggaatcactctgtgcaggggtagggaacagatatggtgtggtagagaggaagctgggactggttggagacagctatagccctagtgtgccatgtccagcagattacactcagtcctggaggcgacgggagtcagcggaggctgttgtgggactgacttgcctctgcctgggagaccacagtggcagtggtttgtcaggcaggtgttggggagggaggccagtgagctcctacggtttgcacagtttgcaggagagagctgctgagggcccagacaagaccttcttgctgaggcagggtggggatgccatggtggtagatgggagaagggctgggtcttgaggggtgagacagagcttagtagttaagcatttgggccctagactctgcttgaattaaaatcctgttgtgcagcttacttgctctgtgaccttaaagcatatgactacctctctgggctgcttatctgtaaaaaggatagtattaaatggcatttattttataaggtttttgtgaggatttgatgagaacctgtataaagtgcttagcacctgtataaagtgcttagcatggagtgtggcacagtgtaagtgcttactacgtaggatccctgacaggacagagatgaggattaagttctcaggaggacctggtggggaggagttcgaatgcacctgctgtcctaaggggctggtgcctggccaccaagccctttgattcagaggcaaggaggcccgcccatcctctcttgcagctctcagcagtccctctattgtcagggctctttcccactgctggttttgcagggagacagggcagttggctggaagcagctgctttgggtggtaaccccttctgtagagtgaaggtatgatattgtcctatttctaagtgcctagcccaggacgctatctggagagatcttgtctttgaggaagtgctctaatgccacagcctcgatgtggtagggcctgcctctgctgtcactgttctgtgtcagtctccgttaactcacagcatctcttcttactctgtgccttttcctgtgggatgtggcttcaaggagaccacagatgataagttggaggaagggagtgaggcctgagattgcaaaggtgtgatattaggagactgatttttccccctttccacttgctttgttagaactagagaagtcactgcagactgtgaggagagtcctaggagagatgggtgtgggataggaggatgggaatgttctggtgccccttgtagagtgccttgttgagaggagcatgggaacagtgcgtccttggagggaatctctgagagcagcatgtttacaggtggcaagactcaaggtggagccacgggtgaggagtggcttcaggctaccattgaccagatagtcccaccttgctggtaattgagctgaagtgcctggagatttgtggctagagctggtcagatttgggttcaggtctcagctcttactgtgaccttgggcagattacttttccctgtctgaaattgatctttagctgtaaaagtaatttctcctcacagagctgtatattaataataagggagattatatataagagtaagagattttatgtgaaaactacccagcacaacatttgtcacttagtggccacttaacagtattcatttcctttactctcacctttgttaaccacagagctccaatcttttccaccactaagctcggccacaagtggctgctccaacaacctgggctaggagtctgtttcctacttgctttctgtgttccttccctgagtctgtacacagaggactggggcatcaaaaaactctggaattggaatagcatattgggagttcatggaacattttctcacctgttgtattgtttgaacttcacagcagctccatgaatccatggagggcaggagttactatccctctcttacagaggagaaaaccaagccctaagggtaaggtcacatagcaagttcatggcagatcctaggatttcagattcctgctatagtattcagtttattctcccattctggggaaaatgataataggatggaccgttctataggaacagagggttattttgttttgttttgtttttcttccctctggccacatgtgtttgaccagcctagacttccatctgtggacaagctggactcattgcctcaatttcaaaacccgtcctgcactcatccttgccacaacaccggtgtcgagatgcttggcccacccagacctttcccacactcctacatgggggtgaatgtagccgctgattgggggtgggacacagaagagcctcaccctcttgactttctggtttgtggtgacacttccgcctaagcttctacagaacatgggaacctggggctccatgccccaaatatcctgagaagggcttttccaggattctctatgacaactcaagagcatgcattcattcatgtgctctttaatttgtcatacatttgttgtgggccttgctactgtgtgttgggcacactgagctggatgtgattactccagcctctgacttgttcatggtggcagtagatctctagcgtggtttgtgttccatctcaccatacctactctccttaaaaaaaaacaaaaaactagctttcttgggcctcagtggctcattgaataagtgagagacgacttgtgcttccctggctttagactctggcatttgctaactgtgccaagcactgtggagaccagtagtggacataaggttagggtagatacagccagaaaggagataaataggcagacagataaaattcttataggatttggtgagttctatgaaggaaataaggcaagaggctgctctgtcagggtaggtgagggtgtgctgtgataacaaatgatgcccacatatcaatggctggcaacaaggaaggttaatttcccctgtttgctatgtgtgctaacctacaccaccgtccctggagagtggcctcagtggttctgggtgaggcctctagtacagaacctgaacaccctgggcaaactaggctggagagggatttggagtatggaggtttagaaggaattaatttctatgacttaggatgcatgtggtgagtgtggctttgctgttgtggtagagtagagtgctgcctgtgtgggtcaagagactgtcttggctgacatctttgaaataggtatatttgtgtggcccttgcctaattgtcatctctgccatagctgcccccgccttccccaccaacccatggccctacttgagctgcctgctgagcctactctgttgtggccacagtatcctcctgctgcccagagtttgagtttctcgctacttctgccactcatcacacttgcttcccagagctttgctgggtgtgctgaagtctccagagaaagtggggaatatgggtgcctagagacttctagggggtgttttcagcccctagagagtagagaagtgtgagaaggggttggtccccgaatattctgtagttttggggaagaagcaatggggacagtggagttggttgccttaagagaggctatggtcccaagagatgggacttggagagtctctacttgcattcctggctaagcccttaatattctcgcacccctccttgcaagactagttccttttgaggtggttcttggctagcttttgagaggctgcagtggctgtgtgcccaggcttaagtcctagctttctccccactctttacctcctaggaaccgggcccatcctgggggaggcagggaggagctcctttttatagtccacatgtaggctttgtgtataggctctgctgcttccttccggccctggcccttcctggtgttggccggtggccctggcttcagcaagactcaggatgcagagtaaacggggcagggcgttctcctacagaagactggcatccctttttactgagcccaggcctggcacagaggaggctggagttaggaagcaagaaaacgaggtgacccagtccttgatcctgagaagcttgtgatctggaccatgcagaaaaccgctaatgcccagggctggcaggagacagctgtgcctaaagtgctgtaggctgggcctgagggccaagatggaatcgcttttctccctgtagcagcccatcctaccccctggggtccctccacctgccagctggcacacaggtgttgggtaaagcatctgtacaaaggctgtgaggggcctgggcgcaaggcagcaaggcttgggtacggaggagagtgggtggtcttactgatgttctgggccctgacagtgaacagctggccaaactggtgaggagttgggccatggcgagtttggccacttgtttgtgtgtgtttagttcttcctgggcacaggtggggagttcactttggggttggcttcctgttttcttggacacctggggatatggttgagttaaaatgttctgagggaaatgattgttgagggcatgggcttgggtcatagtgtccttggcttggccttgcccatggtaggagtcgggtattgaccacactgggttctggctgtgtaggtgtggatgtgtggtgggagaattccaaccccaccttgacttcagcctaaggcccagagagtgtgggcctgagttcacagggtgactaaccctaggaaggagtgaaggagagctccagttggccataggtcccacaggtttctcagcttacttgggggcaggaggtgagctaaggaatacaactccattccctcagttgggaggttgggcagcgatgggggcaggggtgatggtccttctctgaggcactgaagacccactttatggtcaccctattctgcctgatagtccaccacctgtttggaggcagctcccctcttcctgccctagtcacttcctccaccttcaacagtaattgagtataatgtgcctgtgttagcttgtccatcctaactgggactgtggccttttcttgggcgttcttagcatatctaccaaggaggttggaaaaggtaacatatgtcactttgttaaggattttgctgagggccttttgaggccagcagtgaaacacagagcattccctccagtgagaacagaatgtctgttgccagactgatcacaagaggatggcctggttctggcctgagaactggtctacaccggaagcatgaagctccatacaatcatgtgtgctagtaaagtttgggcaagcagctgtcctaagcaggtaaaacgataggttattcaacttcaacttcagagaaagaaatccaaggtagccatctctctcagtaggggaggtgagttcaaagaatttaagctgggctgggcacggtggctcacgcctgtaatcccagcactttgggaggccaaggtagggggatcacgaggtcaggagttcaagaccagcctggctaagatggtgaaatcccatctctactaaaaatacaaaaattaaccaggcgtggtgtcaggcgcctgtaacccagctactcaggaagctgaggcaggataattgcttgaacccgggaggcagaggttgcagtgagccaagatcgcgccattgcactccagcctgggtgacagagcaagactctgtctctttaaaaaaaaaaaaaaatttaagctgggctttctgggcaggcagtgagtgaatgagatccctggcaccttggagtgagatcagagtctagatcactcactggggccctgtttcccaggaagcaaaaagggaacaggagagtggcttggcttgggctggcatggcgcaaagggagtgcagccagatgctgtggcggctgggtcaagtagctctaaaacaggagagcctagtgggttctgctgaagcaggatgtctcagcaagcaggcctctgacctgacgacttccggtcattatttagaacgtctccagccccacagatttactctgttggaggcttaaggactaaaccaacatttactgtccaagaggtggcagtaacacagaaaccaaagaggcaggaaccaaggttggggtggtgagatgtcatggggttcagggagtggcagaggggaaggcctctattctccctttcccacttgtctccctacctcagcccctgttgctctgacgcttcccccaccactatgagtcctaggcccctgttgtttccttgtaggagggagaccccagatttttatttcttctcccaacccattccatttcctctcccttgtgagagggctctgcagagacagggcagcagagagagacttggagatatgctgggctgtggtcaggagggcctcatttatctagtgagcaggaacaggttatatagcagtgatgctttcatagtatttttcttgaataaggtccccaaaaccttattaagttcctggtaggcatggagcattgaagatggcagacatggtgcagtctctcaaggagtttacgctctagtggagaaaacaatcagacagccttaaaatacatgtatggctactataataaatactgtgaagcaggagtgcaccacgaaacctggagtcctctccatcctccccttctgtctgtgctggccctgcttggccacttccaacaaggattctgaggcattacagagcacacgtctagggtacaggcagtcttggctttgaagtattgttggctttgccactcaccaactgccaccttaggtaagttaattaacctctttgtgctcaatttcctcactcgggaattggggaccctaatacttacttcatagtgttatttgcaagtataaaatataaggcagtttttatcgttgtaaggcagtcttatcaagagctttatgcaatgtctatgcaaagtaaatatgcaagaaattagtgttaggatgccagatgctgctgttgctcatcgtctcttcccacccagcagaggtagtaactacttcatcctctacttctcagcttcttatagtatttgtctgtggactctaacgtaagctatctagcataatactcatatctaatttttccttccacattcaagctccttgaggtacttgtattccaagtatctagtttaatgtctctcatgtaggtgctcagaacgtatggttaattttgaataataaagccagtgggacttctcagagggctggattgggggctggtgagagaaaaggagatgcgaaggatcattctgaagtttggagtttgggtacctgtttgaatggtgatgctcttagctgacccagggggtatggcaagaggccttggttctggtgagagagagaagacagtgtttggttttgaggagttgtctttgagacgttttgagatgaagagtggggatagcaagtaggcagctgaattgaaggatctgaagcttaagaggagaggactaggctagagacctgtttgtgaattatctgtacataggaggtaattaagggtgtgggcatggctgacactgatgaggaagaaggcagagcaccggaagagaggaccttgacctgagccttgaccaaggccattgctaaatgcaggtaggcctgtagcgcacaaagaagcatgaaaaccaggcaaggttgtgcaggagaaatcaagggcagagcttcaaggagagagggcgtgatcaaccatgttgattgctctgaggtgtcaggaaggaggaccatagataagtgatttatgggtcaggcacggtgattcatgcctgtaatcccagctctttgggaggccaagactggcgagtcatttgagcccaggagttcaagaacagcctgggcaacatggcaaaacaccatctctgcaaaaaatataatcagcctggcgttgtggtttgcctgtagtcccagctacctgaaaggccaaggtgggaggatcacctgcacctggggaggtagaggctacagtgagccctgttggtgccactgcactccagcctggacaacagagtgacttatgggccaggcatggtggctcacacctgtaatcccagcactttgggaggccgaagtgagaggatcacttgaggccaggagtttgagacaagcttgggcaacatagtgagaccccatctctataaaatataaagaaaaattttaaaagtgacttatacccattgctctggttctccaagtagcctgagtgtactatgtgggggagcattttatgagggacttttgaggtcctgggcatccctgagacatggccctggtgggtccccagtctctctcctgtagctaggagcctggcatacacaggccatctagaaagaacttaggcagcatcagtctgcaagggaggcagagtttggagcacactagactcctgacacagaggctgacccatggctgcctggagaatcttctgggcttgtgcagaaaagttggggaaagccacctttccctactgtggcagtcaaggcttggtataggccatcttccctcccttctcatccatgatactctgaatgccctgtttgtggaacttagtggactcctgcacctctgtcttggtttccatgaacccctctgcccaatgtgtgcttgtcagccctccagacctggcttttacagagcactccaagacattgctctacacacactcagctccacagacacctccctgttgttctactcgttgcatgacctcatagttatctgcttccccatctgtttcctccatcaggcaggggttttctcaaaggcaggaactcaaatgccttattgatctctgtttccctaggacccagcccagggcctgacatggagtagatagatgcccgataaatgtttgatcagatgatggaatgaatgactgcataagccgaatagatcactgctgagtgctcttccagctttaatttctctgggtgggacctcctttcccttccttcctttggattctgttcttacctctgaaataggtgagattaatttagagtcctagggaagagggctgcctgcctggatggtacaaaggctggctgtggctgctctgtgtttctctgtatacccagtgtcagggatagcagctgctgtggggacactgcagagtgtcccagttctgccatgactcaccatatgaccatgacaagaccctttggaccctctgtttcctcattgtttcaaagagatttgtctagaatctagaccaagcttgtccaactcgctgcccgcgggtctggtttgaaggcagctgctgcacagtaatgggaaggacagtaagccccaccatcgccttccctttgccatataaccctgtgacctcagaagtccctgaacccagatccttgtttgtaaaatggaaagggatagctacccacccctccactttgaccttcctttggtggcagccagatgtgctcagggaaacctcagatttgtgagtatgtttctactgagaggcaggaggaggaatattatagtctcaggaagagggaggaatgagagggagaggagaactctcaccctttccacaggctttgggcatatgcagccagcttggaaatgctgaccatcctgtgacctggctactattgcatcaggcttccttcccacctgtgtccaggtcctatctttgtctcttctttggctacctccatccttttccttcagagctgcaaaaaccttgccaaagccgtatggtcctgatgggtgcagagcccctgtgcctctggctgcctgtgaagggggatctgcagtgcagtgcctgccgtaccccacagggagttgtataggaacctggggatggggtgactgaggtagggggccagaagtggcccagatgatactcacttctgctggaacttttctttgtccatctttcagcatcctctggtggagaaggcttagctccattaatgctctcctaggtcctggctgtgtattttctttggtatgggagtggggaactgggagggactcatctgtttgccacagactacatgtggagagggtgattggtgagaggtcattttggagatctacacacctcttctgacccctgggaccactctcctgaatctcctcatggtcttggcttcgggcccagcagggcgtgggtgctcggcatcctgctgcttttactgtttttcccaaagctctgttagcttcccgtggttcccactggctataggaatctttatgtaaggacttcccagtgtttccagactgtatttgcccccaggggtcacattccccccaactatgcctgctgctgctttttctgttcccgttgttacctcactgaccactgcattttcagtatttgttgtagcccctcagcctctgtggcccactgtgccacctcttccaggaagccatccttgataccatctttctggtaccatttttgagcatctgtggcctttgctgcctgttagataattagctctggaatctaactcccatgtgtttactcctgctcttaagtactctgaacattttgaggcctccccaggccctgggtttgtgttggactggtagggaatggagagaagagtcaaatgtggtttcttccttggaggagctcataggccagtggcctaagacaccagggaagcaccagcaggtgtgacaagtggtgacacacaagagaggagggggcacctagtgtgcccctggcctgggcctggtgggggcttaagtgaggaggtaggagtggcttgtgcaaaggctgaggcaggaaggagtatggggagacatgggctggtgtctgtgttgtgttaattggacttggacccttttgaggagggctgggctttccctgccttcctccagtgccctctgcagagtggggcacacaggccttgaggggttctggggtccacaggccacaggtgggggtagtaaaaacccccagaagggaaggaacctgtccaggaaatcttcgcttacctctttcaagctctttagattttaaagagacctttcatatttactatgagttgcagtttttttaagttacaaaatttctttactccatgcatgtttaaatggatagtttttgctaccatttacatcaattagcttacacactttgggttttgtgtttttgttttgtgtttttagagaaaggatctcgctttgttggccaggctggagtacagtactgtgatcatagctcatagagcttcctactcatctgcagcctcaaacccttgggctcaagtgatctttcccaccgcctcccaagtagctgggactacaggcatgtgctaccatgtctagctaagtttttttaatttttattttttgcagaggtggggtcttcctctgttacccagatgggtcttgaactcctggcctcaagcagtcctcttgcctcagccttctaaagtgagcgtatgcactttataaagggaaaaccctctctgaagagaaatatttcagacagggcatggttgctcatgcttctaatcccagcactttgggaggccgaggcaggcgaatcactggaggtcaggagtttgagagcagctggccaacatggtgaaaccccgtctctactaaaaatacaaaaatcagctgggcatggtggtgtgcatctgtaatcccagctacttgggagactgaggtatgagaatcacttgaaccccggaggcagaggttgcagtgaaccgagattgcaccactgcactccagcctgggcaacagagcgagacacccagacccagagaaatatttcagtgaaagcatgtttcatgttcagaaatttggggtacttttggttatggttttcttggccatatcttcatcatttggtgggtttagttttcaatatgtcctcctgtccctttctgattaaatcacttctgtatctcttacctcattggcatctcactgtagtccaatgaaggaggtgccaggagtggtgattctattttgcagatgaagaaaatgaggctcagagagatgggtccaggcctcctgcccaccttgccagtgcttttgttcataatacctctctacaccctttttgcctgctgagcggttaacaggcttataaatttgggggacctctgtctgttgggctatttggaagtggcttttttgagcacaggggatactaggacacaggttccaacaagaaacttaggtctaatttagggtcttggatttgatgattgggctccctctcccccttctagggcctgccatgtgtctgccccctagggcaggattggctggctctcactggctgtgctctgaggagccctgcctttgctcttctctttctcttccctagggttcctgctgtccttgaactctgccggggcaacaggaatactgcccttatgcacatcctcgtggtggccagacagggtggttatcccactttactggacaggaagagagctagtggcaggcctgtgacttggcctgatgtctcgggggagtcggggtgggagcaagagtcaaagacaggaagcagccctaccttcagaagagccaggcacacagatgggtcctttgtggttattgtcttctccctttcccaggttccagactggctgcccgccatatagcttgtcccttcgacagcaccctctctccccactcagtggattgggtgctgtcccagggtgggggcttactctcctgcagaggcaggttctcagctggccctgagggttgtatagcttcacagctcccagagtgcttgggcatagggtggctcagatgaggaaacaggctcctcttttaaagggaaagcaactgccattactggcatgtccaaaagggggatgctgtccaggactgcatggcccagaagctccgctctgagtaactgctggtctctaatctctgtggtctcaggccaggagtctgtccctgggctgagaagggaggggagaagagggaagagatggaaaaggaacattgctcttcccagtctccctggcctcgtcatataaccttttattttacaaattcagtcttgtggcattttgctttaatgcttagagctggccccaggtgccaggcagcaggcacatttccttctgcccaaaaaacaaaacacacatgaatctgaggttgggcgtggtaagggcaggccaaggctgaccgtcctatgtggatatctgtgaggtagtgtgcctacatgtaagggtctgttgtgggtctactcccacgaaagccttcatcttacgatgaaccagagaggactgcagacttgccaaggcctagctatatgcttggagccaggatttgaaacttgatctttggggatgcacgtgcctcagactattggtgagtgtgctggtggggcactgcaggctcaggaagcagcgtgtctgcatatgcttatctgtacacaagtctgtaagagtcccccttctccccatacaatgcccccatccctgccaggcttctttttgagctggcgaaatagctgcttgtattcttctcttcatggatcatctttatttcacccaagtttgggtttgcacctagtggagccttggcaagtggccttatttgtctccactactgccagcttttgtaggctccatgtcaatggcactaggcacacaggtagacaggtgggctgtctccagacttctctattaccagcacttcccagcatggccctcacagcaaccatgtgaggtaagaggaatttccagtttcctgatggggaaactgagaccaaaagagtgagggactgccaaggcctcatagctagaatttaagagctgtgtggttctcctcactaagctgggaaggggatggtcagggaaagcttcttgaaagagcaggagaaggcagatctccatcagggcagggagcagagcaaggccccaggattctgcctggggcaccaggaagcctggcttatgagaaggttctcagtcctcagagctgacatgtgatatacagtccaggcacaggtgtgtgtggtccctcattacttcagagccccttaagaaagactgaatctatttcttcatcagagtttgtgagcgattcaatataagggactaaatccccctcactgccccaagcagcttatcttgtcactgtctaccatagccacatttggaatggtaatgcccaggccattcctgaagcccaggcagcattcactgtgggcttggggacatggtgccattcctgaagcctgggcagccatcaccatgggcctggggacgtggtgctgggcagaatgaatatgctgcagccctgatgggctgtgctggctgggctttgccttcttgggtcaaggcgagcctgggcattaggcctttgtcattatgctatacatcaggcttctgggctgctacttgtgggatcctgcccttgttctcaaagagttcctccttctcactgccccatcttcttcatagtgacggcctcttcgtacccctggcttttcttttccccagagttcccctgaatgttgtcctctcatggttctgagttggggaggagtgctaggtcatggatttttgggtataacgtgtgactttcctactcccctaagtagttctccccttctcaagctcctaagttctgggaaggtctcttttcctgccctcctgactaatggcagagaggtctgacccagactgtgccagactggatcattcgctctgtcacctgccaccagggcagaggccattcctctctggggagtctccttgtgaatttctggggaccagctctggctctctcaagaaagaggatgctgccatatttgttctgggaggcaggaagatgaagggtgaggttgggaggtagcacaggatgtggctttcaagaacctagtagagcatctcactgtgctgccagggccaggctggtgccttcttacggaagacagtacaagggatcaggtgtggccaacaggaacttgggagcattggatgcctggcgtggagctgcgctatgcttacctggttcctatctcaggcacctgttctgccttcaactgatctcaatggaaatatgtgcaggagtgcaggcctgttgactctgtgtgtgtgtgtgtgtgtgtgtgtgtgtgtgtgtgtacagtcacactcacctttgcaagaaggtgtgggagggggatgacagcagctccacaccggaagagcagactggtttctgtttcaaaaggcagagtttgtggttgttctgcagtttctgatctagccatttcccctgatggaagctcctccttctgtcattggaagccctgtgttctcggttaggtcttttatggcccagttctccctgcccctgtttctacccgagtataactgttcatttttgttccccatccctatttggttttccctccttctgcctgtgtacctgcctttttcatttcttcagtcattaagcaagccctggaggggccctgcctggccttaggtatgtgagcatgtatgtacgtgtttgtatgcacgaggcatcaagtgtattagtaccacaggaaggagcttctcagttgggcccttggtggaagagaagggagccggggaggtggacatttccagactaggaatcaagatgaaatagggatgggaagcaacagctattcttgccctaggtgtggcttagtgtggatggagcagagagggtgagagggcaaaagctggggaggtaaattcctgagccctgtcacaaagagccttcaaggccatagaaggtgtttgttgtttgttctccttagactggcagtgggcagcctcgggaggggcttgaatgaggtctaggggggtcagaataatgttttatgaagagccagaagactggggaaggatggctgatgggtgagaaccaggggtcagggaaaacagcagaaaaggcaggactctcagctggaggacaggctggaggggtttgctgaggggacaggtggttccaggtagaaccagaaatgtgtcggggagctagggttagggccagaagcaatgcccactgttccaggtgggatagatgtggagttttgtgacagttgctagagggacaggacaggaagagagcatctgggggagttgggccgttaggacattccaggcaggttggtgtgcagttcgggctggaagggctcctggggtgggggctggccaggcaaatgctggcactgcatctggctccgaagttaccaggccagtctgggtttagaggattttaagaggcttcagagcttggggagtactcaaagaaagtcatagctgttggctaagccaagcttttttcctttgacctaatctaccttaaatcggtgatttctgggctggaatgtctgccctccagccagcaggcagcccctccctgtgctggagagtgtgtcagagcctgtgcacctttgctgagggagcagaggagtccattggatgggccccctccatgtcccacatatagtgctgggtgtttctagctgttacgacttttgatcttaccaacatctttctgatgctattgtgttactcttatgttactctcttcacaggtgtagcagtgaggtcagagtggctgtcactttattgagatcacatagctaatgtgaggtagagctaggattttagttcagccagtctcacccagagctcgtgcatgttttttctaccaccctgccttctagagaaactcagtcaagccctttgctttacacatggtaaaactgagactctgagaagttaaataaattattcatcattgcctcaagttttagtggctgagggcaggtcatctgctattcaagcccgtgtacctctctgactatgccttgtgaaggccacgggagcatgcaagggccttggatagctaagataaggaaatggtcccaggcaaaatggtggtctgggtccaggatggttgctgctcttggacagccagtgccttggtcaggggatggggtggggattaggccccttgctgagacttgtgtggggatggctttagcagttaggcatttcagggatgcaccagtcctctgggccagagcctactttctcccagggatcctgaggcccatcttgacctacccagccctgcctctgggactttatgatttgatttgtgtgtaccttgtgtcaggaagtggtcctcatgaacagccttgggtccctatttcttcttctggagtctagctcttttgcaggtcaaaatgtctcagtgagggaacaaagatagggaagggacaccccacagaaccacctttcccccatatagccctctctgacatctcagcccttacttagcaaaggcctatccctagactcaacccagccctcttattaccagagtgactgagtggtcttggctctgcctctggggttcctccctgagagagagtgtaagaatgaggaaaccaggctgccctcctttcggtgttgactctgggagaccccagcttgatcttggcctctttgctaccttcctagttgacattcgtgaaattaaggagatccgcccagggaagacctcacgggactttgatcgctatcaagaggacccagctttccggccggaccagtcacattgctttgtcattctctatggaatggaatttcgcctgaaaacgctgagcctgcaaggtgggagttaagggggtagaggaggtagaggatagttaggggaatgcctgctggctcctgcccagtgggaggtatgtgccctcggggcagctattgataccttgctcacagccacatctgaggatgaagtgaacatgtggatcaagggcttaacttggctgatggaggatacattgcaggcacccacacccctgcagattgagaggtaagaaccactcctgaaggggttagggctgggagcattagggaccagggggacagggacagcagacctttgtgtgcccagacatctcccaggcctgactgtagatggagaagtggccctcacctcaggcttctctctccaggtggctccggaagcagttttactcagtggatcggaatcgtgaggatcggtaagtactgagctgtggctgtagcccagcagggtggggatgggcatccagaaccttagccaggcctctaagtagctgcccggagagccagaggacccaggggaccttaagtggggccaggagggtgggcagaaggttctgccacgtgtagctttctgcacaaagtcctctggtggccttggtgtgagctggtgagaggagccagccacatgctgtgtgccctgccactatgggcagagactggatgtgtagaactggctttgggtgtcctggaggtgagggtggccagtagcgtgtgaagggtgccctgaaactctggctctgagacctggtatggcagccagaggggccaaggagagaagggggagcaaagaccagatagtgtgggtgctgcaccatggtgaggtcctttgacctgaaagaaatgggaagccatggaagggttctgaggagaggagtgatgtgacctgacttgggttactcaagatcactctgcctgctgtgtggagagctcagttaggagctgtttccacactccaggtgaaaaatgagagggcttggatcatgatggtaatggtaggaagtggctggattttggccatgttgtattttgaagatagcgccagaaagaatgtccttaacagattgattttggggtgtgagaggcattgaggataatagtatgctgtttggcttgagcaactggaaaacagagtcaccattgactgagatgagaagatcatgggactagcccatttggagggaagcttgggttcagttcgaggcatgttaagttttctgatgcctattagctgtccagggagagatgttgagtaggcaggtggttagagtgagtttaggtacatacacagtaggggctacagattttaacttgggagtatgtagataacactgaaagccacagggctgggtgagatcacctagggggcaagcagaccaagaaaagggcagggtccagtggctgatcccagaccacccccatattagagattggaggggtcagggacaactagtgcggtaagaggagaacccccagagtgttgagttctggcagcccaaggaagaagacagtggtgaaatctgaccgttgacccttggatttaacatggtgagaagagcggtgtcaccctagcggtgaggggctcaagggaatgagagggagcaagatgactcttgcaaggagttttgctatggaggggagcaaagaagagggcagtagctggagagctaagcaggggcaagacaggtgtttttggtggaagaagtaacaagctgttcgtatgctgatgggaaagagaccacagagggcaagatcggtgatgcaggcagttgcaaccagaaggcctctgtttcctcactggaaaacaaggaccctgatagcacctacctcctgggtgactgaggatcagaggagggggcgcctatatagagccagccctccctccgcagtgcttgatccactcagtgtggcgctcagccccctcggggaattttggtgcctcctcccaggctcttggggcccagaggaggtggtcccaccctcccctcccctccttgacaccaccttccaggagagaaagccccccccttcccccttcttgtccatcctgttgccaggtccagcagtgtccccagcctcacatcctgggcaggacacccctggagagcaggggcgcttgttctctcagtttctttcctggagccaggccctgtctagccccaggaggtgcccagttgccagtcattgtatttggtggagcatgcacctcctccttcctccctctcatgggttagtgggttctgaggaccaaactcccagcatcccagtgggcagcaggtagggacctgctgccatgctgcccccaacagggaagttgtgagtgagccctgccttctgtcttggataggctgactgccaccttggcacaggcctcagcagtgccggtaggaggggaggcctggagtgtggtttttcttcctcccatgcctgacccactttactgaatctgttcacatcttccttgccagaattacaggttttttttgtttgttttgtttttgttttttttttttttttttttgctcagatgaggaactgaggtccaaagaaaggaagggactaacctcaccccatgggttctgatccagtcttgccctcaggcctccaggttcccagaatagtgttgtttacctgtccagccccaggtgggctcgacccacaggtcagaggtcatgagaagctggatgagaccactggggatgtccctgttttctcagtatatcagccaaggacctgaagaacatgctgtcccaggtcaactaccgggtccccaacatgcgcttcctccgagagcggctgacggtaagtgccacccagggctgtctgtagatgggggcaggggaagccaagagcccttcagctgggggcctgactgcctgactggcactcctgctctataccatgcaggacctggagcagcgcagcggggacatcacctacgggcagtttgctcagctgtaccgcagcctcatgtacagcgcccagaagacggtgcatgagccacctgccctccctcaacccctgcccctgctcttccaccccacaccccagctctgcctgcctcagccctgctgccctgcttaggggcttttgggtgccatttctccagttcttctcctcttgaggcctgcccccatctgctgctctagcctgccttcttactagcccatttcccacatggcctcccaggggtcttgccctgaccaggttctgtttcctgcagatggacctccccttcttggaagccagtactctgaggtttggtttggagtggggaggtggggttttccctgggcccccttcatctctccactgggcgattcttgatccaggtgggaggcagtgggagtagggaaccatgctggaccattctgggaagctgtgctggctgggagttgggttctgccttccgtggggcaccttgttgtctgttgaccatactagctagcttaccttctctccctgcagggctggggagcggccggagctttgccgagtgtcccttcctgagttccagcagttccttcttgactaccagggggtatggctgggctgacattggcccaggctggtaggttgtggggggctgggctcatccctgactggaggcttctctcatcccctgccctccctaccccatcaggagctgtgggctgttgatcgcctccaggtgcaggagttcatgctcagcttcctccgagaccccttacgagagatcgaggagccatacttcttcctggatgaggtgagcccgatgtttcacccattttttgtcaagagaatgagtaggggtgaccaggaccccacccgggctccaggagctagacgctccttagggatgccaccttgtttctacctactgtgcaccttgcccacccccagttgggacagagcactctctctcctacccccaacctaccatcttgggttggacagggcagggactcactgtctcttcccttccacatgtttctggacagtttgtcaccttcctgttctccaaagagaacagtgtgtggaactcgcagctggatgcagtatgcccggacaccatgaacaaccctctttcccactactggatctcctcctcgcacaacacgtgagtgtggctccttcaggcccacccagcttcttccccaggagggcccatctgaccatacctacctgcctctccttgcctatccaggtacctgaccggggaccagttctccagtgagtcctccttggaagcctatgctcgctgcctgcggatgggctgtcgctgcattgagtgtgcgtggggtccagggctgggggagggaagatgggaggcctgcccgcttgaccatggtgatgttgctccccagtggactgctgggacggcccggatgggatgccagttatttaccatgggcacacccttaccaccaagatcaagttctcagatgtcctgcacaccatcaaggagcatgcctttgtggcctcagagtgagtcggaggctggatgacccaggggttaacttggctccaggtctctcgttctagagggacagagggcagaaagactcctcaaatgccctgtcccctctccctcagcctttcatctttgtccttcctcttggcctctcctcgtcacctgctccctgcttgagctgttgcttcccaagttacactttctgtttcctacgtgttgggcccactctcttcttcatgggtcctttagactgtagaacacatgctcttctcatcttcagaaaacatgccctggtttctttaggccagtgtcctgccaactcctttgccctcacagcccagaagattgtctctgttccctgtgtcccattccttcaattctgtttactgcttaaactgtggtcactggtctcccttagctcaccagggctctaacagctaactttggaggcttctcctctctcctggcctctttggtgtgaaacatttttcttgcactgctgagcagcctccataattgggccagctcgggactgcatcagttgccaccctttggtttccactgctgccacagctgtagaacccctctctgccccaccagtggctatggcctgcctcttttctgggatagtttttacagacaagaagcccccaggcccttggcttccaacagctcactgtgaggggctacttagacccagagaattgcagaatctgtttcactgtgcttgtcccccatcccgcaggtacccagtcatcctgtccattgaggaccactgcagcattgcccagcagagaaacatggcccaatacttcaagaaggtgctgggggacacactcctcaccaagcccgtggagatctctgccgacgggctcccctcacccaaccagcttaagaggaagatcctcatcaaggtggggtggcgggcttattgcggaagccccacacttctcagtgccttgcccaggccatggcttcagctgttgggcctaaacctgggtgaggaggtggggtgaggactggggtctgcattgccctgttctggttgcccctacagcacaagaagctggctgagggcagtgcctacgaggaggtgcctacatccatgatgtactctgagaacgacatcagcaactctatcaagaatggcatcctctacctggaggaccctgtgaaccacgtgaggactgggccaggctgggggtggtaggccagtgggtgtgaggaccctggctcacaagtccctctttggtctgttccaggaatggtatccccactactttgttctgaccagcagcaagatctactactctgaggagaccagcagtgaccagggcaacgaggatgaggaggagcccaaggaggtgaggaaccagctcaggtctgggggctgggccaggtcaggcctgggccagggtcacagtatctttgctgttgccttcccctgacaggtcagcagcagcacagagctgcactccaatgagaagtggttccatgggaagctaggggcagggcgtgacgggcgtcacatcgctgagcgcctgcttactgagtactgcatcgagaccggagcccctgacggctccttcctcgtgcgagagagtgagaccttcgtgggcgactacacgctctctttctggtaacacttcccatgcagatgcgtatgttcagtcagcgtgtgtacacagacatcacatcacccagagataatcagttaacatttgagcctttgatccaggacaataattaggctttacatggaacataatttcacctacatacacacacacactctctgtctcaccccccccccatacccctcccttttcggttcatttgaagcccacacctttggttcatgtgactgcccacacctgagctcctcaggagattggcctccctccttgaggctccctccttgagttccaccctcatttggggtggaacttggtctttggggccctggcctgttttccccagcctccctcactctgtgtcttccacaggcggaacgggaaagtccagcactgccgtatccactcccggcaagatgctgggacccccaagttcttcttgacagacaacctcgtctttgactccctctatgacctcatcacgcactaccagcaggtgcccctgcgctgtaatgagtttgagatgcgactttcagagcctgtcccacagaccaacgcccacgagagcaaagagtgagggaagggcctgggggcggacaaggcagggcagggccatgggtggtgctggccgggcctgactctgcctgttctcaggtggtaccacgcgagcctgaccagagcacaggctgagcacatgctaatgcgcgtccctcgtgatggggccttcctggtgcggaagcggaatgaacccaactcatatgccatctctttccggtgaggggtgtggcactgggttgtggggccttgcttgggtctgagctgccctgaccctgtgtgactgttttgtccttgtgaagggctgagggcaagatcaagcattgccgtgtccagcaagagggccagacagtgatgctagggaactcggagttcgacagccttgttgacctcatcagctactatgagaaacacccgctataccgcaagatgaagctgcgctatcccatcaacgaggaggcactggagaagattggcacagctgtgagggggctgtggtagacggggcatggcaggggaggcaggagagacccagaatcttaccagtctctggatgtgtgtaacagcaagacctggtgtgttgtagaagttcgtgggagggcccctgactccagctgggagccacagtgtgggtaccaggagggtgtctgcaggaggggacatctgagcagcatctttaaggatggggacaggcacataagcagagggttcctcatgagtcaagatgtggagtgaggaggttctggggctcacactgggagaggtgcacacagtggaaactcatccacctgggcttggcctggactctgtcctagggcagatgagatgaggctacccaagagtggttgtggagcctccgcctggtggatggtatggagggcagagccacaggaggtgagaccagtgagggaaaaagtcaggacccatggcagcacagctggtgataagggccctggacagaaggaaggggtctaggaccagaagatcagttgagagactgctgtcgtcagtagacagggctggctggggagagagaggcctgttgtccactggcacctgggactcaagtgatggagaggagcggcaggaggaatgtggggagtgggaaggcttttcctgactttgggctcagcagtgaaccaacaagccactgaactaaagcactgaatatgggtagtctgtgaagggcccacctgcacatagctcagaaatacttgggagtttgggcatttaggacctgagagattttagaatcctgggctgggccttacatgtaagaatgtgaagaaaggaaagggaacagtgaggccgggcctgaggcctctgaagccgtctctactgaggtcgaaggatccctgtggatcaggtgcaagtttgctgcactgggggaaagggaagctgctccagaaaccagtagctgctttctacctctgggctctggggcattaacatatcccattgtgtcctgtttccaggagcctgactacggggccctgtatgagggacgcaaccctggcttctatgtagaggcaaaccctatgccaactttcaaggtacagctcaggcctctgggcataggaagctggggagggtccccagctgcttggggcttcatttctgtgttctgggccatctgtggtctttgtggagaagtggtggttgtggttttccgaggcccaagaggttgtgagagatgtgtggttggtgagcgaccgcaggtctcccagggccgacccactccctagcccctaccccttaagtcagcagtgaccctttaaactgctcctgtgggtgacccctgtttccttcctgggcagcagcggggtaggagctgggaggcacactggccactcattccccggcctcatggagccctgttacacaggttcttttttgttttgcctttttctctaaaaaggcctgggccctatttctcaccccctcccctccacagccaggggacctggaaggaagtttttctttccacttcacagatgagtggtagggtcccatccaggccccatatgcttccaggtcccggggaggcactcagggccactgcagaccctgccttcttggcctgccagccctgactcctgggagcggattcaaggttctccctgtggcccagggtggggcttaaggttccacctgggtcccgaggtatttcactggcagaggccctgcctctctgatcatatctgtcctggagcttccctgcagggcagtaacaagaactataactagggcctgttgatggcagtgtcatctcccactggcctgaccccaggcagggaagcccaagcacatgtgtgtgtgcacatgaagccccaggttggcagtggcagggagagcctttctgctctgactggtgcttctcacctctgcagtgtgcagtcaaagccctctttgactacaaggcccagagggaggacgagctgaccttcatcaagagcgccatcatccagaatgtggagaagcaagagggaggctggtaagccagtggtgtggtaggcccagagtccaagggccccagtggagctggggccccaaagacatgcatttgtgatgtgcttgtctcctgtgtgcaccagcagtgcctgcctcaccctggcttaggcatgggaacccctaccaaaggataccctcctcatgggagttcggggtggttgctggaggtcagcaccctgtggctcccacaggtggcgaggggactacggagggaagaagcagctgtggttcccatcaaactacgtggaagagatggtcaaccccgtggccctggagccggagagggaggtaagaccagaaccacctgagtaacagcattccctattcccagattctccttggcatgcccccatcacacagtcccaagcacgcacgtgcatgcacagacacctgtcacatgggctggtcgcacagcccatgtggccatgcacgtagtctcccatatacctgtgctacatttggcagtcacaggtacacccacaagatgtatttgtcccatgcacacggatatcccctcacacacatatgcagtagccatgctgaccattggtgggctttgcttcccacagcacttggacgagaacagccccctaggggacttgctgcggggggtcttggatgtgccggcttgtcagattggtgagctcccatctgtttctcttgcccactgttccctagggtgagattcttctttgtatctctttcctgctcctagggaggaagctgatggctgaaccccaaagtctgccctcactccaagctctccccatgctctggacatccccttgacaccctgggctccctttgtcactgtcagctttgacccctgcatgtttacctatgccaggcactggggaacccgtcagaatcagcagaacaaagttgatgctgctggttggctgacatccccaggcctaatgggttgtaccacagggatgtgacagaggcttggagatggggtggagagggagacacggcctgaggaagaagcatgagtcagagctgagttggaacactggctccaccacaaccagcagtgacttgtttgagttgtagcgtcgtcatctgtcaaatgggccagcagagtagtccttcccctcatggggtgtgggaaggaggaaatgggatgagatagaactcatttgagccagtgcctgcggtgtggagtggggtggagggggtgagatgtctattcccagctgttatctgctctcgccctcccagccatccgtcctgagggcaagaacaaccggctcttcgtcttctccatcagcatggcgtcggtggcccactggtccctggatgttgctgccgactcacaggaggagctgcaggactgggtgaaaaagatccgtgaagtggcccagacagcagacgccagggtgagattctgctggaaccttctggggggcagtgtgtgggcccgtcaggcagctgaggcctccagctcccagcacaggccccctcagagcagtggggcagccgatggcctatgctagataggccacagcccctgccttagctagggattgagaagaaacagacacataagatgcaatgtggtgtgtttaggttgtgttgagtttgagatactgatgggtcgttgaagtgggtctgcttagtgggcaattggatacacaagaccagaggtaagaggagaagtcctgggctggaagcaggagtggagtgggggctgaggcatagaagggatgaggtggtgtcgcataggaagagaacttgggatggattgagaagctccatatgagaaggcatgggcgaggaaaggagcccaggaaaggcaggtcagacagactgcaggccactggtgagggagagggtctgctgtgttgagagctacagaggtaaagacaggaacgataagaacttgcaagtgccctttggattcagcagcagctaatagcccttgtgagacttttgagctgcatcagcagcatggctggcattagatggcagtgggcagcagggagtctggaatggcaaaagcagagcctttgtagggcctgtccttgagggagagaacaggtgactggggtttgagcaggctctcatgcagatggctgaaaggagcgagcagcgtgtgggaggagatggagcccaagcttagctggtaggaccagccttctggagaaggtggcctcttcccctgagcctgggggaacagagaagtattctcaagggttagggaattcctacttggtggccctttcaccaagtgcatttggtagatgggtctgtagctgctttggagagggcacccgcaagccaaatagagaagggatagggtgcttgccaggctgtcccctagaaggaaaaggtgctggcataccaggtggttgaaggactggatctgggggtctaggctgaaaagggaagagtctgaatgtaagagccactgaggccgggcgtggtggctcacgcctgtaatcccagcactttgggaggccgagatgggcagatcacttgaggtcaggacttcgagaccagcctggccaatatggtgaaaccctgtctctactgaaaatacaaaaattagccgggcatgttggccggcacctgtaatcccagctactcgggaggctgaggcaggagaatcgcttgaacccgtgaggtggagattgcagtgagccgagatcacgccactgaactccagcctgggcgacagagcaagactctgtctcaaaaaaaaaaaaaaaaaaaaaaagccactgaaagaaagtcctccaggagaggatgggttggggtgcttgtaagtgggcttctgtagagatttggcatggagatttgccatgaagagtgggtggttatatttgagttgggggcgctgaggcagtgaggatcatccttaggacacagatggaaaccaagccaggggcctgtatccccagtgcagtcacaggtaacacagaagaatcatttttaccccagcatgaggctgggtaataaatggtcagaaagtgtcatttgggagtgtggccaattccaggatccctggaaggtcactgggaacatgggtggtgatgaggagtctgtatcccccaccccccctaagagggttggagggcaaatgtgtcctctgggacagaaaagaggaaagatgatttcaggatgaggctgaggacagagctccctcatttactgttgggtgtggtgtctggaaggtacaggggaaggtgggagaggggcccagagcacctgcagtgtgggcatgcccaaggttggcaggggcttccttctcctgggcagggctgtagcctggggctacagggccttgtgtgtgtcaccagctcactgaagggaagataatggaacggaggaagaagattgccctggagctctctgaacttgtcgtctactgccggcctgttccctttgatgaagagagtaagggccagggcccaggcggggtgtgcatgtgcctggagggcctggtgggtgcaaaaagagtatttaggtatccccccaacacttcctgggtgggcgggctctgtaagtgttttccctgtttggcccagagattggcacagaacgtgcttgctaccgggacatgtcatccttcccggaaaccaaggctgagaaatacgtgaacaaggccaaaggcaagaagttccttcagtacaatcgactgcagctctcccgcatctaccccaagggccagcgactggattcctccaactacgatcctttgcccatgtggatctgtggcagtcagcttgtggccctcaacttccagacccctggtgaggaagtcccctgtgaggagggtgaggaggggcactgtggggcagctggactggaatacaccataatctgcctcttccagacaagcctatgcagatgaaccaggccctcttcatgacgggcaggcactgtggctacgtgctgcagccaagcaccatgcgggatgaggccttcgacccctttgacaagagcagcctccgcgggctggagccatgtgccatctctattgaggtgggtgctgctcatctgggcttcagggtaggaaaggggctgcttgccgttggagtctgtttatgttgagttctccaaaagtaggtattttcaggcatcaaggtggtcagggtgggtggggcctgagctgagtctttgaaggggtgaagatagcatgcagtcactgtatgcatctaggacgtgcagagccatggtgtgacttgttctgatgacttgttttgttctgatgagatcttttttttccctaaggggaggtcatttaaaagatttctgtgttaaaatagtaatggatttaacatgaagtagattgcaaaactcacatggaaattttggctaaagctcagacttcagataaactacaggcagcagctgctctggacagcttagggtccctgatgtcgtgagggactccatgggcagtgtcccgggggcccagcagagggcgcgctgcctccactccacagatgctgactgagcctccgcagtggggaattggagggagcaggaaggacaatcccaggcccttctttgtctgcctacaggtgctgggggcccgacatctgccaaagaatggccgaggcattgtgtgtccttttgtggagattgaggtggctggagctgagtatgacagcaccaagcagaagacagagtttgtgggtcagtctgtcttcccagtcatcctcctcatcctgctggggcactgcaagcctctccccaccagtcatcccatcctctcccacggtgacctgaagccttttgtcgttgccttcacagtggacaatggactcaaccctgtatggccagccaagcccttccacttccagatcagtaaccctgaatttgcctttctgcgcttcgtggtgtatgaggaagacatgtttagtgaccagaatttcctggctcaggctactttcccagtaaaaggcctgaagacaggtgaggaccattcctggaggcagtgcccctgcaatcttgctggcagggtggggctgggccccttgctctgtccctcgtgggctgagggccaggcttttcctcctcctaggatacagagcagtgcctttgaagaacaactacagtgaggacctggagttggcctccctgctgatcaagattgacattttccctgccaaggtatctgcagcaggggtgggctggcctggggtaggtgggaggagagccaggcagcagcctctagaagtgcagaggagtcattgaccctcttgtgcacctggcttcgttgaagcaggagaatggtgacctcagtcccttcagtggtacgtccctgcgggagcggggctcagatgcctcaggccagctgtttcatggccgagcccgggaaggctcctttgaatcccgctaccagcagccgtttgaggacttccgcatctcccaggagcatctcgcagaccattttgacagtcgagaacgaaggtgaggaagatggaggggtgctagagccaggaaggcagtggctaggtcctccttcttcagtgtttctttctcctgggtagaaaagttgtaatattgtctggcattgggctgcaaggccctgcctgccagtaaggacactcttcccttctgtccagggccccaagaaggactcgggtcaatggagacaaccgcctctagttgtaccccagcctcgttggagagcagcaggtgctgtgcgccttgtagaatgccgcgaactgggttctttggaagcagccccctgtggcggccttccgggtctcgcagcctgaagcctggattccagcagtgaatgctagacagaaaccaagccattaatgagatgttattactgttttgggcctccatgccccagctctggatgaaggcaaaaactgtactgtgtttcgcattaagcacacacatctggccctgacttctggagatggatccttccatcttgtggggccaggaccatggccgaagccccttggagagagaggctgcctcagccagtggcacaggagactccaaggagctactgacattcctaagagtggaggaggaggaggagccttgctgggccagggaaacaaagtttacattgtcctgtagctttaaaaccacagctgggcagggtgagaagctagatgcccctgcagtttggccctggagccagggcagaggaatgtagggcctgcatggagaagggttctgccctgcctgaggaggaggacacagcacaagggcacattgcccatggctgggaacatgacccagcctgaaagatacaggggatcatgttaaaaatagcagtattatttttcgtctcaatggtattgtaactaagttatttactcctcctgctcctcacccctgtagggaaaccttggagaggagagtggcaggtgggctgcctgctgtgttaagaggacttagtttgtgatgtaaggcactgtcaggaatggggggcgggccagggtgggaagagaagaaatagcagagcctattttggtgaggttttttgtttttaagtcaaagaagactcagtatgctttccctgaggaatgaaaaagggattgaggagttgcctgactcctgggtgggtggggtacaggcagttaggtgctgaatgaagctgccatccttgctgcagcttctaactggtaaaaagatccagggatggagatgggaaggttagaaaggcagccctcacctctgaggacagaggccggggtccaggcccgtgggcgcaaaggtgcctcatagcatagccagcattcagcacacacaaacctactgcccacatttgggctcagggttggccatttgctagttctgctgccctcttaagatctgactgccaaataaatcatcctcatgtcctttttcctttgacttgtatgctctttcgggggctcaggaaagcctgttgcatgggacatgctcactagaaacagtcgccagatgattattctgcagtagaagcaggtaggaaatttctggaaatttctcaggttaagcagcaagagctgtaacccctcctctgggctaacaggagttgtgggtccactctctcctgcccaccctctgagggtgtgtctgagcagagtacatcctgcctgggttctttgtggccagccagttttggtggtgagctggaaacaaccagagcccctttccagttccacagaaacctctcctttcaaaaatgttgcattcagttcgttaacactgccaggtgccattctgattgcctctaggacttggcagctgaaatctctgggccctttcaacacagttgaaaggcccttctcttcctgaagctctgtttccatagttggctgtgctgggatggaacaaaaatgacgccacacaaaaaatttaagatagatccggttccgtggatgacatgaactgatgatagccagtatcaaacagcgatagtgctcaggttcttgtgtgactttcttttacagcttcacagtcccagttcatagagaggagggtggctttttcccatacacaagaaggtggtgggtgggaattcacctgggccctcatgatccatgtttcctctctaggtttttatggcctggagagaaaggtttcctatcagagaaggaagaggactgtgtaggcccttctgttagggcccatccacgttggttaggacgtccttggcgtgtttgttagtgttgacccttttagttttcatcaatacgtatctctatttgctgaacaagtgtctttctggaacacaacctggggaacagacagctctgcctttcttaaggcagctttgtagacctgaggctcacctctcttgggctctgtaagacattgcctttgcctcactgcaaatgttttgattgttcttcctagtggaaaacgtgccaactctcaagcaaatttaaagatcattttcacttcaagattcctccagacctgacaaatgttgattgacccagaaggcagagtgtttgttggtggggaagacccttacttggggccgaatgctttggcatcaggagttgtttgccccatcccatgcatgcaggccgtgtccctacagtgcgacagctcagggttatgacctgtggagtctcaaccctaacagcacattagcaccacttggggagcttctgaaaaatactggtacccggggccttagcataggtattgttcaaaacctctcaaggtgatttaaatgagtaacaagggttgaaaaaccctgattttggcagcacaaaccaaaagagcaggcagggccgggagagggaagtcagtggtaccagaaggtagatgggctcccttgcaggctccttgttctcctgccatcaccagtagaaccttctggctgacagaccagggacaagtagactgggttcaaagtgacagacctttcactttcaacagctttggctcagcagacatgtacacatacaaagtagagcctacaaggtcaggggcattctgcccccgccacaggactaaagactgccctgcgggaagatggcaggagcagtttctgacctcagttgagtatctgtggccatgagcagaaaaggcaggggtctgcctcctgaccaagcacatcttgaacatcacctgagagcttgaacatcactaaggacctagacactcacttgtctttcaacttgagcccatcactcaccatgtgagttctgttgagggtgggtagaaagcaaataggttcaggttatcccaccagactaactcggtgaatgaaaggatcatgccttcttcacattttaattaaatggatcaagcacagtctcagactgcaactcctgtcttctctgggtactttagtaattcccaggggacttgtgcttaggggttaatctaggcattctgttccctgcctggaggaaccccacagcaacccccctggctggccgctcctgcgaattccacccatagtatcccaagtgagtcactgcctgagtctacccactacagcattcagctgattggctttgccagttgcatgccagtttggtctagtttccaaggacctggtttttgggattcaacacacacagctgcttccccatgacataagctggactcctattctggtgtccagaatcactgcctggctccactgtaggtgatttcatttcaaaggaccctttttccttctgtcccaggccttcagggccaccccaacaaaattcaaatgctttgggtcttagaagctggggctttagtctttttcctccagaaagcccctgggtccttatgcatattccctaacccccgacaccgccccagcaaatgacaggctatgcttttcagcactctcacaggaaacagaaaagaacttgccagtgtcctctcaccagatgataccaggtttgactgtttgcctttgtctatttagcataatttctaaaatatcatagttttctcatgtagaagccagtgtggtgatctcagcaatgcagaagacagtgagttggaacttctctggtgagctgagggaaactgccccactcatccactggagtttaagatccacagaagtgggcaagaacaagtgaaatgtttttggcttttttcctgactcccccacaaaataagtcagcagatgtgaaatatatttatgtttttatttaggaataatcaaaaggtttgaagtaccattgaggcccatttcaaattgtacaagcaatttgtccgtgttcccctcccttatccaaatccacagatacaaaatctaggaaatgtgcaatttgcatcttagaaatagcagcatccccacaggggacctcgtgaggcctggagattcagccccaagagggcaaccccactcctgcctcagcacgaccacagtccaaaccgaagttaagttccatttttttgttaaaacgtttacccagggtaaagaattcccattctacccaaggcttaagtgatagagtatgctgttttctcggtttggtctctcacacctggccatggcaggagatgggaccctcttgcagagtttggctaaagtttcattgtgcctcaaaacaaacaaaaacagggcagttgcctcttacttgtttagcaccaagatgatcaccttttcagccatctctcctgacagcagactgctcaacagtcactccccagtcttattgcccagaagtccggccacagggaacaaggctttgtgctgaagaccaaaatgcaaatgggtgctagaaaaccaggaatcaagaccttgtcaggaggcatctacaggcctttggcaacctccctgacttccacaaaggctgccctcagtaaaactcaatgaacaatggccagcaggggagaaaggaaggtgggcgtgttttctctttaataacaattatggcacaatctgaccctcctaacacttctgaacaaagcaactgctcagaagcacagcgggaaccctctacacaggggtgactgcttctcccctggccccgacccagtctaaccgagaacaaccggattgctgtgctgggtccctgctgaggagtagggactggcgctcctcactcctgctgacaatctcatgtggggctctggccctgttccaagcaaactgcaagaacgagaccaaacagtatgggcaggaaccagggatgagtgacaagatctccctaaacaaattacaggattcataggtaccatgtagatttttcttttaaatgtatttctactcaggtttgattcttgggaaagaccaagcacttgtagctctctattcagtgactaaacaacctgacatttcacttttaactccagtcacattaagttttttttttttttttgagacggagtttcgctctgtcgcccaggctggagtgcagtggcacgatctcagctcactgcaacctccacctcccgggttcaagtgattctccttcctcagcctcctgagtagctgggattacaggcgcgcaccaccacgcccggctaatttttgtatttttagtagaaacggggtttcaccatgccgatcaggctggtctcgaactcctgacctcaggtgatccgcctcccttggcctcccaaagtgctgggattacaggtgtgagccactgcgcccagccaagtcacgttaattttgaatcatccacttacggaaaggaacagaagttaaaaagcattaaccaagaaaaactattcattaacacatacaggtgctcatgtgtgtgtgtgcacgcgcacatgaacacacgtttcaagccagtctcctgaaggaagaggcactaatggcaggtaaatgctcaggctcctctcagtaccctggggctcaccgcctatccaagtggacagcagggaaggtgcctagagtccccaccagagcggctgccttcctcccttcgctcagctgccagagcagccacgaaagccaaattctcagggctgtggaagctttggaccagcaacaacaagctagtacctatatgttctttatcatcctcaaagtcctgcgaacccaaagatagaactttcagaaattgaggaagggggtgctttcccctgtccttgtccatatggtaaccagggtctgcctagtctcatccccagcctctgggttccctcccctgctctagacttcagggcagttagaatggatgactctgctggatctagagctaaatagaaacttctttgccatagaaacttctctgttgaaggactgcgtccccattcaaagaggtcagatttgtgggcaggcaagagctcaggaatgaagaaccaaaaaggaggctctcaacccctctccaaggccagacgctctctgtactcccattaacttcacaaccaagtgcagacgctcggtgagttcagagaccacttggttagccctgccccacccctcctggtgtgacctggcactgggaacacacagattgcagcagaaacctgttggttccatttgcactcagagcaaaccaagcagcaccttgattgccacttttcctccagccactctgtcaaaatcaaaactggttgcctcaccagccctggtgtggcatggcccaaccatgtccctgccgccccacttaaatggccagagaaaactacatggtgggtagatgaggttgaagccttgcttggggaagggacttgagcacaggagaaaggcttgagctccacaactgcccatttgctcagacaatggagcttttctgagatcaagtgctccccaaactacatgggagtagccccccgtggtctgggcaggctggctgagagaggtctgtgctctcaggtaaaaggagagaaggaagctgggtcaagagaccctgaagaggagggtccgtgtctggagtgaggggaactgagccctgctggctacctgacctgggtgggctgctggctttgccctggaagacttgactatgtgggccttcatgtgtctagaggatttttcttctccagcatataactaccttgagaatggatgtgatatgtgaaaatttaaatttaatacaaaagcacatctgcaaatggtgagtcaaactggtgaaatctcccaggtaaactctgagcaagaaaaaagagaagatgactttaggaaaatcctaaacgaggtttggttttaaaattttcttcttggctggctctcctctcctgcaagttgcctttatccacttggggtgtgatatctgaactgaaaaagctgcaccaatctgaggatattggtccaaaaagagacaagagaccacgaggctcaagcagagagcatccacacagcatccaaccagaaaggccagtgtccttcctccatgaaaggcagccagggacagatgtcccagagccaggagagagagggagagaacacaggacctgcccctaggccactgactgagcaggataaaacccacaagggcacatctcaggctacggaatagagagatttcctggtgggacggcctcccaaggctagctggagatgagaccactagtacatgtgtgagcccgcaaggcactacccaatgttctgtccaacttcctccttgtgctactagagagcacagtgtggagtccttgtgtcaaggtgctttggtccacctgaacagccacctgtcactcagccaagagaaaggagctttaagttgtacaatcactaccaaaccccaaggccctggcaagccatccaactagggcgttctttttcaggaacccaagattctcaaaaatgacactcctcccctcccaaaataaaaaagctcctttatagtcaaaaacgaaaacaagtaatcaaaatatacaaagcatatgtatcaaatttaaatttcctttatcagaatgatcatctggtttcacctttgagaactcgatctacaaccccatgtaaaaaacaaatgggtacaagacatcagcaacaaaaaaacactaaaagatgattttactatctctgacgagtccaactgcatacagagaaaagggataagattagccactttttataggctttttcttcaggagagactaacctcacccaactctcaactctgcagcccacaaatgccttctactgaaggcaacaacacaatttaacccttaggcagtgtgcaaaaccacagtgagctgtcctgtgacagggctacatacctggctgctgccatcccacatcccccactgccactgggctagtgtgggtgtgtctctgtgcacgactggctggattcagggttttgcccccaaacccttgagtacctcctacaatgtccctttaagcacctgcgtgatgactgcctccctcatcatcgcttttgatcatctttcaaggataaggtccagagcatactcactcactctcatccaacagcagaggaagaaggatctgtccagactgctgggctccttacatgggcattcttgccttttgtagtgtagccctggctgttgggcagggctaacatctataagaaaaacataccagggcaggcagcactgtacttttccacctgaaagatgagctagtgcccatggctgggtcactgtaggtcctgcatgaacttgtccaccaactgtgttttgctgtttgggttgtaaattaaccgtgaatacaagtaaccaagaaaatcctctccacagaccaactcttcagccagtgcatgcagggctctggaggtgatgccagcaggatctggaggtgaggcactgggtggtttctcagacacccggagatggcttcagcctgggccgccccagctgcctagtgcactggtgtccctccaacacaggctactcccccaacacccatgtgccaccaagtttctcaactgcacacgccagatgcgcgttttacgagaatcaaatgagtatttatactgtatatgtgtgtgtgtatatatatatatataaattaatctgcacgtatataaacactaaaaggagaaattccaagtgtctgttctctgaaggaaagcaatcactcgccattcttggcaattcctcaaaggtttttgagaccaaacatctttactccccaaattaagaatacaaaaataggctgcaaaacttgccaagtactcacaagtccctgtttgagacaaataagatgtggtccctattgggacagggagggcagaagatgacactttagaagaacatgattttggtttcaaaagcaagacctctcctggaaggcagaaggggccaccgccatgcttgtccttggagccacatgagcacggtgccctgccaggtccagttccctgggtaggggagaaggacggtccctaaaacaccaccagtgcttcttgcccaaagcccttgccctctctctggggtcttctagcactgtcactctgcccagcccaggaggtgtctgtgcccacgaagcctggtacttgtggcttggcactctgggaagcaggtggtttctaagaaatgagcggagctacaggtggacaggtctttagttcgcccctctttaccagctactctcagagcaaccggtcttggggaaattgaggatttaccatttagaacagctctgtaagcaagttttctaattttcaaaggcaccatttcctgtaattttctcaattcaaaaaaggacatgagggttaggctaaagtagagttcttgtttccaagtttggggacataaatataaaactttaaaagcatcctcacaaggaccagtgatgcccagcacccttgggcatgcatccagcacaccggccagaccctggggtgggagccacgggcactctgggtgttctgccagggatctctgcatgcaagtctttgtgctaaagaccaccctacctctgataattccaagaagtcaacaaatccctccagccttcacccttactaatgggccagtgtgttattccttcccaaaccataggaggctctgaaatgagtgtggagaaagggctctgaaaaccgcagtggtcaaagcttcaggctgtggctatagatttccacttacgtccctaccccatgtcttttttccatctttctctcactccaaacatgtctagattaaaaaaaaaatgcaggcacataggtcagcacattaggcttaacaacaaatgtttctttagttgatctgataactgaaaagttatggtccatgattcaaactcccatgaaaaagcagaattacggtaacaactaaagagaatggtaaagcatccaacgctaatcacattgccagtccattttttgaactgagggttacagcaggttctgcactgagtagcccacaaggcaaagcaagcctgacatgaaacgtagccggtcatcacttaatgcagcagagatctcttcaaaggtactgcttccttgaggaacacaaagggggcacaaaggggttccagacgtagctttgtgcctataacttccctgcctgactgtggaaggtgaggggcacctgtgacccagcaatccccagagaacagacacaggtcatttttagagatgacgtaactgacaatgcactgcttggctaaccaaagtttctacgtaatgacagtgttgataatctgatgttttatttaacatatagaggtggatgtatatgttaaaagcttgattctgtgtctatgaatatgactatgaactctgaactattttatccattggaaggtaaaggaaaggtcctacattgtgggaggaagaactgatgagaaccccatcttgcttgctgcttgcttggtggtgggcaggccgagggtagcggcaggctctgggctgtctgcgaggattctggaagctctcccaggtgcccagcagccgggcatgggaacggcatgtggcagcagagagtcgggtttggctcttccacgtggcaggcggtttcccagactggccagtccttcacattaatcagatcaaattcagtctgtttctgagaagaaaacacatgcctgtcactctacggcagctgccaccacctgccccccaggcagcctggtccttgctataccagggtggcatcactggctttgaggacctcttaattccatgagcaatgaatggccttctgccacccactcccccaccctccagcctgagggaatgtgggttaaggacaggatgctggctcaaccttgtaaggccatcagactctctgagagaccctgctaaaccctaggcctagcagcaggagcagtggtttggcctctccaggcccactaaatccccctagctccccaggcttccgccaccaccgtctctggagtcctgtcctaaaatgcttcatcctgccctctccttccaggctctccagaacatactgttccaatataatagcagctgggtctagttctgatatgtattctactgatgtcttcacttcatttgtaacttgcaaccctaacatcaaagtcaaagtaaggctgatatcagagaggttcatcatctgtgattcataaagaaatggtccttaattgcagctggctgagaaagccatgagaaaccaggtacagataaacagattggcccttcctgtacccacagttacctgtctcagacagaagagaacaatgccaatggcaatggccaccccctgccattcctgctctgtcccacaaaggacagcaacatgtcactttgtgttggatttagtagctgaggggagccaatgcttgtcattcaaatccactcatcacatttccatgttgactttaagaaaaaaaccatggtaaaatataaataacataaaattcaccattacgacaattttaagtgtacaattcagtagcattaagtacatttacaatgttataaaaccatcactctatttccagcaatttttcatcatcctaaacagaaattatatatccattaaacaacaactccccatgtcctccaccccttaggccctggtaacctctattttaccttctatcgctatgcctttgcctattttagatacctcatgtaagttgaatggtacaatatttgtctttttgtgtcttgacatctcacttagcaaaaatgttttcaaggtccatccatgttgtaggatatatcagaattttattccttttttggctgaataatatcttactgtatgtacacacacattttctttatttatctggtggtaagtacttgtttccgccttttggctactgtgaataatgccactaagaacactgatgtacatgcatatgtgagtccctgttttcagtccttggggcgtatacctaggagtgaaattgctggatcacatggtaatattctatattcaccttcttgaagaaccacaaagtcgtttcccaaggagctgtaccattttatattcccaccagcaatgcacaagggatccagtttctccacatcctcccaacacgttgttttctctgggtgtgtgtttgtaacagccatcttaagtgtgaagtggtatcacgctgtggttttgatttgcatttccctaatgccaaaggttcgtcttttcatgtacttattggccatttgtatattttcctatgagaaatgtctaaatcatttgcccgtttttgaattggttttgttgttcagttttaggagttctatacatattctgaatataaatctcttatcagatgtatgattttcagctcttttctcccattctgtgggttctttcattcttttaacagtgttctttgaaacacaaaagttttagattttgacgtaatccaaattattattttcttttgttgcctatgctttgagtgtcatacataagaaatcattgcctggccagatggggtggcttgcacctgtaatctcagcactttgggaggttggggaggaatgcttgaagtcaggagttcaagaccagcctgggcaacatagcaagatcctgtctacacacacacccacacacaaaatagtaataataaaattagccaggtgtgcacacttgtaatcctagctactcaggaggctaaggtgggatgactgcttgagcccaggagtttgaaactgcagtaggtttgattgtaccactgcactccagcaacagagcaagaacctgtctcaaaaaaaaaaaaaaaaaaaaaaaagtaataattgcctaatcaaaaatctggaaggattctattttcttctaagtattttatagctttagctttttttagttctttgatctattttaagtaaatttctgtatatagtacaaggtaagagtataatttcatacttttgcatgtatatatccagtttcccagcaccttttggtgaaaagactgtcttttcccattgaatggtctttgcacccctgtcaaaaatcaattgaccattacgtggggatttctgggctttttattttattccattggttttgtatgtctctccttatgccagtaccacactgttttgattactgtagctttgtagtacaatttgaaatcaagtgagtgtgactccttcaactttgttttttctcagtttgtctatttggggtcccctgagattctatataaactttaggatggattattcttttataattgatagtttacatatttatggggtacatgtgaatattttttacatgcacagaatgtgtaatgatcaagtcagcatatttagggtatccatcaccttagtatttattatttctgtgtgttggtaatatttcaagtcctctattctagctactttgaaatatacaatatgttgttgctaaccatagtcacactagtctgctatttaacattagactttgtttcttctatctactataagtctatacccatttaccaacctcttttcatttcccccttctactctcacacccttcccaacctgtgctatctatcattctattctctatctccatgaaatcaagatttttagctgccacatatgagtaagaacgtgtatttgtctttctgtgcctgggatattccaatgaacataatgacctccagttctattattttttgtctttttaataatagccattctaactgggataaaatgacatctcattgtggttttgatttgtatttcccttttgatttgtgatgttgagtgttctttaatatacctattggccatgtgtatgtcttcttttgtgaattgtctattcatgtcttttgtccccccacccacccccaccttttttttttttttttggacacaggatctcgctctgtaacccaggctctggaatgcagtggcacaaccacggctcactgcagtctcaacctcctgggctcaactgatccccccacttcagcctcctgagtagctgggactacaggtatgtgccactacacccgactaatttttgtagagatggggtttcaccatgttgcccaggctggtctcaaactcctgggctcaagtgatccacctacctcggcctcccaaagtgttgggattataggtgttagcctctgtgccccaccttttgcccactttttaatatgattttttgttgaattccttatatattctagatattagtcctttgttggatgaatagttttgcaaatattttctcccactcaacatattgtctctgtgctgattatttcctttgctatgcagaagatttttaatatagttccctttgtctatttttgttttagttgtgtttttgaggtcttagccataaaatcgttgctcagaccaatgtcctgaagtgttctgcactgttttcttctagtagtttcataattcaaggtcttatatttaaatctttaatctgtcttaacttttgtatatggtgagagatacaggtccagttttattcttttgcttatggatatctaattttcccagcatcatttattgaagagggtgtcctttcctcattgcatgttcttggcacctttgttgaaaatcagctggctgtaaatatgtggctttatttctgggttctattttcttttcctttggtctgtgggtctatttttataccaataccatgttgttttggttactatagccttgtgatatattttgaagtcaggtaatgtgatgcctacagctttgttctttttgcttaggattgctttgactattttagctctttcgtggttctgtacaaattttagggtttttttctactcctgtgaaaaaatcacattggtattttgatagcaattgcattgaatctgtagattgctttggacagtgtggccattttaatattaatttttccaatccataagcttgggatgtctttccatttgtgtcctcttcagtttctttcatcagtgttttacagttttccttgcagagatctttcacttccttgattaaatttattcgtaagtatctttttttatttttggtagctattgtaaatcagattaccttcttgatttctttttcagctattttattattggtgtatagaaactctgatttttgtacgttaactttatatcctgccactgtgctgaatttgcttaccagctttaagagttttggtggagcatttttggtttttctaagtatcagatcatgtcatctgcaaaaagggacaatttttctcttttccaatttggatgccttttctttctcttgcctgatttctctggctagaacttccagtactatgctgaataggagcggtgaaagtgggcatccttgtcatgttccagttttcagaagaaggattttcagcttttccccattcagtatgatgctagctgtgggtttatttatggcctttactatcttctttctatgcagttttctgagtgttttttttttatcatgaagcaatgttgaattttatcaaatgctttttctgtttattgagatgaccacacgatttttgctcttcattctgttgatgtgatgtattgcattaactgaatggtgtatgttaaaccatccttgcattataattttttgagacagagtttcgctcttgtagcccaggcggaagcacaggggtgcaatcttgtagcccaggtggaagcacaggggtgcaatctcggctcactgcaacctctgcttcctgggttcaagcaattctcctgcctcagcctcctgagtagctaggattacaggcatgtgccaccatgcctggctaattttgtatttttagagatagggtttcaccatgttggccaggctggtctcaagctcctgacctcaggtgatctgcccaccttgacctcccaaagtgctggaattacaggcatgagccaccatgcccagccaaggattattgatatgtgaggttttgttattgttatactgttgttttctagttgttttatatatttttttcctttttcttttgtttggcattgtactctggtagttttctgtagtggtagcatttgagtcttttcctcatctgtgtgtttgctttgccagtgagttttatacttttgtgtgttttacatagtgttaaatgtcatgttttcacttccatgtttaggactcttgtgagcatttcttgtagggccagtctagtggtgatcaattctctcagcttttgcctgtcttggaaatactttatttctccttcatttatgaaggataattttgctagacatagtatccttggcttactttttttccccttcagccctgtcaacatattatctcattttctcctgatctgtaaggtttctgctgaaatccactgttagtctgatggggcttcctttatagttgcttacacacatttctcttgctgtccttagaattatctgactttagagagtctgactataatgtgccatagagaatacctttttgcactgtatccatttagaggctatcagggcctcctatatctagatgtctaaatctcttgtgagatttgggaagttttcacctattaatattatttcattaaataggttttctcactctttcattttctcttaaccctctgggatcccaataatttagatatgtagttgctttattgtgtcccatatgtcacaaaggctttgctcattttttattcttttttatttctgagttatgtcaaaagacctgtgttctagctctaagacttttttttctgcttgatctaatatattgttgaagctttcaattgtattctgtactttgtttcatgaagtcttctattccagcatttgcttttttatgacatatatctctttgataaaattatcattcatttcccaaattgtttttctttttcacattctcttacatctcattgagcttccttacactcaataatttgaattctttttctgggattttgtgagtttattttttattggaatctattgcaggaaatttattgtgttccttctgaggtgtcatatttccttgctttttcatgtttgtgtccttatgttgatatctgcacatctggtgtaacagttgtttcttctaattttttgcatttgcatttgtaagggaggactttttcctagacgtatctatggtgttgtttgggtaggacactttggctttgattcttggtatgtgcagtagtgtagtctctgtatgatttctttggctataaatagcatcagtggtatctgtgatttcctcagtggctgagtagttactagtggaagctatggtaaaattttgctaaggactggaatgccaggtgggccattctccaggcaccagtggtagcagcagtggacagagcatgcctgtctttggacctcagaggagcatacaatggcaccagtgttagtgggttcaagcaggctgattcttgggctttcgggtggcttactcagatgtcagtagtggcagcagttcccaggcatgtgatcaggttctcaggcccctgggcagctggcgtggcatgggagatggcagtgacagtgttgaaatgaccctctgggtcccaagtgatatgtgcttgtgttggcagtggctgcaacaggctgggcggcccattctgcaggcccacaagtggtacatacaggtagtagtggccaagtgggtaagccccaacctcaggtacccaagaggagtattcaagtgccaatggtggtggactaggctggacaatcccccagcccctagactgtgtgctctggccacggaggtggtggtgtaaagccaggctgggcagtctcatcttcaggctccctatgatgtgtgcaggtgccaaccaaggtgggcaggtgcagggcaatccctaggccaccttcagaatgcttggatagggagtggcagtgctgtactactaccttccattggagagcacagggttgctggccagtggggaatgcatgtgccactcacacctcactcagctccagtggcacttgtgcctcagcccctgctatggtagctggcaccatagttgtacctcagccacaacaacaggagcacatgccttgtagtgcttcagccccagctgcagtaacccagtcacttatgcctcagctctggggaaaacagtctgcagttctcttacacctcagccctggcactcagggactccaggacagtgtacagtcttttggggggtgggctttaaatggcatcttgctgtagctgttttgttctcaggaagtgtgggggacccagtgcgagctccgttctggagcagttccattgaacaatctcctggcacctcctatgttaagtttcagggactgcaagggctgaggagctctcccgtggctagaactgcagaatcctttcatggtggaaatgtggaccactgagggtctctcacttaccttttccccatgctggggggtctctctcagttcccagccaatcccagctgaacaggctgccttgcttctttttccttccttactttgtttcctgtctcttttccgtgaattccagtgttctgtcttggataatctattcaaagtgtgattatctactctctatttttgttcttaatggaagaggcgagtacaaaatgcctctagtcagccattttggttgggtcttcctggattttcttatttctgtaaaaatgcgactatgcttttgatagattttacattgactctgtagtttgctttgggtcacgtctacatcttaatatcaatccatgaacatgggatatctttctatttatttaggttatctttaatgtttttcagcaacattttgttgttttcaagatacacttctttggcctccttggttaaatgtattcctaagcactttttctttttgatgcccttgtaaatgataccatttttaaaattttcttttcagattgttcattgcaagtgtataaaaatacgaccaatttttttagacagatagggtctcactatgttgcccaggctggcctccttgaattcctgcctcagcctcccaagtagtgggactacagttatgtcactgtgcccagctaaatacaaatgattttttttgtttttatatcctgcagctttgccaagttcatttattagctcttaactatttttgtgtgtgtgtggattcaagttttttttttgttgttgttgttgtttttgttttttttttttgagaaggagtctcgctctgtcaccaggctggagtgcagtggcatgatctcggctcactgcaagctctgcctgccaggctcaagtgattctcctgcctcagccctaaccctgagactaaaggcacatgccaccatgcccagctaattttgtatttttagtagagacggggtttcatcatgttggccagggtggtctcgatctcttgaccttgtgatccacctgccttggcctctcaaagtgctgggattacaggcgtgagctaccacaactggcctcaagtttctacatatatgatcatgtcatctgtgaacaaagataattttacttcttcctttcgaacttggatccttttatttattttttttgcctaactgctctggctagaacttccaatgctgttttgaatagatgtggcaaaactgggcatctttattttattcctgatctcaggggaaaagttttcggtctttccccattgttgagtatgatgttaattgtgggcttttcatatatggtcttcatcatattgtcatattcctagttactgagtgtttattgtcatgaaagcaagttgacttgttagatgctctttctgcttgaattaggatgatgtgttttattctctttattcttgtaatgtggtgaattacattgatattcatgtgccaggcaatccttgcattgcagggatagatccctcttgctcatgaggtataatccttttagtatgctgctgaatttggcttgctattttgttggggatttttgtatctatattcataagagatattagtctgtagatttcttttcttgtagtgcccttgtcttgctctggtgtcagggtaatggtgacctcatgagttaagaagtgtttactcctcttcaatttttttggaggagtttgaggagaactggtgtgttaattcttctttcaatatttggaagaattcaccaggggtcctagacttgtcactgttggaatgtttctgataacaatcttcttaccagttattgatatattttggttttttatttatttgtcagttgattttgggagagtgcgggtttctaggaatttcatctaggttacccaatttattggcacataactgttaatagtagtctcttataatatcatattcatgtgaaaatatcttatattcatgtgaaaatgtaacatcccctctttcctttctgatgttagtaatttaagtcttctctttcattcttatttaaaggtttgtcaattttgttttttcaagaaccaacttttggtttcattgattctctatatctgctctaacctttatttccttccttctggtaactttgggtttcatttgctcttttctagttctttaaagtgtacatttagtttactgatttgagatcttaaaaaaagtttttttaagacatggggtcttacgctgtcacccaggctggaatgcagtggtgcaagtatagctcactataacctcaaactcctggtaaacaatcctcccaccccagacacctgagtagctggcactacaggaacatgccaccacacctggcttattttttacttttttgtagagacaggatcccactttgttacccaggcaggtctcaaactcctggcctcaagtgatcctcctgccttggcctcccaaagcactgggattatagatgcaagccaccatgctcgactgagattttttattttttgagaaggagtttcgctcttgttgcccaggctggagtgcaatggtgcggtctcagttcactgcaacctctgcctcctgggttcaaattattctcctgcctcagcctcccaagtagctgggattacaggtgcctgccaccatgtccacctaatttttgtatttttagtagagacagggtttcactatgttggccaggctggtctcgaactcctgacctcaggtgatccacccaccttagcctcccaaagtgtggggattacaggcataagccactgcgcccagcgtaagttctcttttaatgtatgcatttacagctacagatttacctcttaggattgctttcactatgtgtcataagttctggtatgctgtgttttcatttgtctcaaggtattttttactttcccttatgatttctttgacccattagtttttaaatagtgtgttaatttccacctatttgtgtatttccacttttttattttcaatgtctagtttcattccactgtaactggaatgtactctgtataatctcagtttttaaaaatgtattaacacttgtttcatggcttaacatacggtttatcctggagagtattccatgtgaatttgagaagactgtgtattctgctgttgttgggtggtattctgcttatgtctatttggtctaatttgcttagagtgttgttgaaatcctctatttcctgattgatcttctgtctggtttctatatccattatcggacatggaatattaaagtctccaactatttttgtctttctccctttaattctgtcatttctgtttcatatgttttggagctctgttaggggtatatatatatataatatatataaataaatatataaaaataaatatatatttataataaatatatttttatttcatatataaatatatatcttataaatatatatatttatataacataaatatatatttatatatattatatattatatataatatatatttatataaatatatatattatatataatatatttatatataatatatatttatatattataaatatatattatatattataaatatatattatatattatatattatataaatattatatataatatatattatatataatatatataaaaatatatatatttatatatataaatattttatcaatataatatccttgtctcttgtaacctttcttgatttaacatttattttgtgtgcctttttcaaaagaggacactggaggtgaagaaggaagctcttgactctcctaaagctgatcccaaagtgaaggctttgaaggccaagaaggcagtgctgaaaggcatccacacagccaccaagaaaaaaaaaaaaaagattcacacatcacccaccttcctgtggcccaagacattatgactctgaagacagcctcaatatcctcagaagagcactaccaggagaaataagcttgaccactatgccatcatcaagttcccaataaccagtgaccactgagtctgatgtgaattagatagaagacaacaatacacctgtgttcactgtggatgttaaaagccaaaaagtaccaggtcaggctgtgaagcagctctatgacactgatgtggtcaaagtcaacacattgatcagggctgatggagagaagaaggcgtatgttcaactggctcctgattacaatgcttctgaggttgccaacaaaactgggatcatcttggctgagtcttgctggctaattctaaattatatatatataacatgttatacatatattttatatataattgtatatatttaaaatacatatatattttatatataattgtatatatttaaaatacatatatattttatatataattgtatatatttaaaatacatatatattttatatataattgtatatatttaaaatatatattttatatataattgtatatattttaaatatattttatatataattgtatatatttaaaatatatatattttttttctccagaaaaaacagattattttgtctggtgataatatagccacctcagctgtcatatggttactattttctaggtgtatctttttctatccttttactttcaacctccttgtgtccttatatctaacatgagtctcttaagacagcatataaacactatttgtttaactccaatctgccaatctttgtttttaatagaagagcttaatccctttacatttaatgtgattacagatcaaggatttacttctgccatttggctatttgtttttaatatgtcttatatgtttttgattcctcaattccattactacctccttttgtatttatttgattgttcacaatgtactgttttgattctgtttttacaatgcactaatttgttagttttactatttagacagattacatcttacattctatgcccattaatatagatttataattttttaatgaatttgtcttttaaattataaagcacaaagagaaaaagttataaaccaaaagtacaatagtactggctcttatatttacctctaaagttatcttaactagtgctctttttttttttttttttttttgtgatggagtcttgctctgccccacccaggctggagtacagtggtgcgatctcggctcactgcaagctctgcctcccaggttcaagcgattctcctgcctcagcctcccaagtagctgggattagcaccaccaggcccagctaagttttgtattttttgtagagatgggttttcaccatgttggccaggctggtctcaaactcctgacctcgtgatccacccgcctcggcctcccaaagtgctgggattacaggtgtgagccacggcacctggcctattttttcttatggcttcaagtttctgttcagtatcctttcatttcagcatgaaggactccctttagcatttctggtagggcatgtctactaataatgatctccttcaattttatttggaaatgtctggatttctctttcatttttgaagaatagttttgccatatacagaaatcttggtttagaggttttttttttttctttttttcacgactttagatatgtcatctcactgcctttgggcttccaagatttttgatgaggaatcggctgttaatcttgtcaaaaattctgtgtgacgagttgcttctctcttgctgctttcaaaatcctgtcttcaggttttgacaatcctaatataacatgtcttggtgtggatctgagttcatcctgcttggattttattgagctttttggatgtgtagattcatgtctttcatcagatttgggaaattttctatcattatttctttaaatattctttctgtcccttttctttttctgcgattcctatatgagtatatgagtatgaatatactaatgaatataataactatatgaatatatgagtacattagtatgcttgatgatgtctcacagctctctcaggttttttttcctaaatattttttttctttcttctcctttggataatttcaattattttctcttcaaattcactgttctcttcttttgcatgcccaaatctttgttgaatccctctagtgggttttccatttcagggattatactttttagctctagaatttgtttggttcctttttataatttctatctctttattgatattctcattttgttcatgcatggttttcctgatttcctttagttcttcgtccatgttttcctttagctcgctgaacatacttaagatagttgatttaatgtctttgggtaataattccaatgtctggacttcctcaaggatggtgcctgtcaattttttttcctgtgaatggaccatggttttctatttctttttatgttttgtaattttttgttgagaactggacattatgagtattacattgtggtaactgagaatctaattctgtcatgcctcagagattgctgatttttgcttattgagggctggagccaactatttgtgacttttccaactatttttgtgaagtgtgtattctttgcagtatggggtcagtgaagtttctgttgtgatatctctgtggttaaccagtgacctaagatttccttaaatatctggcttgccaaaaggaggaataaagaaaaaaaaaaataggtactgtctctttaaatccccttgtggctagaaagctccctctgcccaagggcattgagacaatgatcagcctctgcactggccccctcagtgattaaatgcagtaatcagaaatcaaaaaactcttttttttttttttttgcaatggagcctcactctgttgcccaggctggaacgcagtggtgtcatcttggctcactgcaacttctgcctcccaggttcaagtgattctcctgcctcagcctcccaaatagctgggattacaggcactcaccaacatgcctggctaatttttgtatttttaatagagacagggttttaccatgttggccaggctggcctcaaactcctgacctcaagtgatccacacctcagcctcccaaagtgctgggattacaggtgtgagccaccacacctggccacaaaaacttgacttttggaggacaaagttgttattgcctaccctggcaccaacagtctgcaccaggaacattttccacagttgcctgctgcagagcttgcggatgctgaaacaaaaaaaaaccatcaaaatttgtaagcctctccatcaagctcttccctggatgttgcaagtgttcaactagacttctgagtcccaaaacagttgcttgagacaattactgccagctcaactgctttggtggaggaaaagattcctggtgctgctactgccatcttccataacatcattctccatgtcagctttcgtaatcaacttgttcaaacatcctcatctctcttgagcatgacaccctggcctactggtatattacaagaagcacagagctgggtataatataaggaccaacttacaaacttggacaaagacttgtaggagagactacctgctctgcattataaaaaagttaaactagccataaaaacctgttgttctgactccagggtgtgccatcagctactttataaagcaggctgtgagctgtgggccccaaaggaggggagtgttttgttgttgccgtattgaaaacatggctggagttggaggaggctgtaagggagccagtggcccttgtactcctaccctaagtgctgaccagggctttgggctccaccaggtgtttgctctcactgtgggctttgtggaactggattttgccttagtatgttaatatgagaagaacaggctttctgcaaatgctaaacagatggatgacatggtactccccgcccccaacccaccaaattatgggccaaaaaggaagtctctttttccttaattcagtaaagaaacaatagcataactatgtttcaaactgttgtgttcaaatgaatttaaaatattcagagaaagaaaaagaattttgtcctttttaagacatcctaagtagaaagcaactggggtggaggagctgggatttgccaggccaaaataaacaaacaacaatggttggctattgtatggaaacaatgcaacaccatccaggaaattctgtgggatttctgagggataggccactatggttggccctggggatgaggtaccaaacacaaggccccacactgaggcagctcatgccaaagtcaccacggaaccatcacattgcccaacaccacaaatagtgtctcctgtaccccctcccacattgccaactcagctagcaatgctgccattttggaacccccaatcccttcagcttctacaatactccgccctcctggctctcacctgagcttctggctgccctctgatggggtctctaatgagaacacaaatgtcaaagggtaaggagggaagggagaggctgggaactcagtgaccaggaacctagaaaatcaacacgtaataacatgacttgtctgtggcttcaaaactatgtcttaaataaaaataatcttctatgatacattttgctttcgagtacaatccagagaaactgaggaacaaaattcaagcttttgattccatgtatgtcaaagaaggaaggtgattttccattatactaaacatttcttctacatcaggcataaccagagaaacacaagactttcatcatcagaaaaaagcacattatgtatctaaggacaattaaaggctctctttccttttcatcaatttgagctgaatttcaactcatgtcctgttgctgtctcctacccagtggctgtggatctgcccgactcagaggatgttttgacctgttctcctattgctaagaaatggctagaaaagcttggacccctttagggtcaccatgttccttcccctgcgcaggtttttaaaaacacatgaaacaaaaaacagctctcaaccgtttatcatattatattcctatggcttctgctgctagttgtcctctgaagcagccaggcggttaatgctgctgccaggcagccttagagacagcagatgcccctgtgcagtaaattcagtgcccaaccataagtgcctcctccccttacccacacaggatagccatggcccctgtggactccttaccgagctgacgtccagcctggggactcgatgtgtcaaagggctctgagctggcctcagggacacggggctcccacgactcactgttctcagacacctctgaataggtgtcacccatccctttgtgaactgctgtgagctcaccagtaccagggccctggtcctcactgcctgtgtctgccacggctctggtctcctcccccattttctcagcaaaccactgcttgacctgctgggagctcatctgggtcttgtcacagaggttctgcaggtcctcttcatacagcatcttgtgtgtcatgtaatagtcctgcaggagctcccggttgccaggggcaatgaccagtagccctggtgggaagttgcctcgcttatagtcttcgtaccatttgagttggccgttcttcagtgcgtacctgctatctccaaaccagcgcaccacctctggccgtggcagacccgtctgggccatgatggagtcatagtcctggttgcttggccactgtgtctggacaaagagctgccgcagcaagtgccgctgctgggcagtctttttgcagctcactttgcctgggagctgctctgccagtttgtttgactcatcatcctcagggtcacaggcacccagccctggaatctcgttcctgccattggcttcagtgaccctcaggttcttcaggttgattttaatggggctgactttgcgctctgccaagatatggctgctgggcatttccagagagccattttcaccagagacccttagctcactggccaaatcctcttctccaccctcatcctcagcagcctcctcttcctcctgagaggcattctcctcagccttcttggtctcctcagcattcacttttttccgtctctctgaaaaccagctatcaatttctcgtcgggtcattttggtttcacttctcaggcggtccagttcctcatcaagaggaagagggttttgtgcaaaactgctctccagggctctgagctgctcaggggctctctccttgtatttggttggtgtgaagtcaggagtctggtgccaagattgtcgtttggcagaagggtgggttgctagtgtggctgttgtcggaatgcaggttacctcagggaccttggacgatggggagaaggacacctctggcacagagtcaatgatgatggaactgtgatctccaggtatcatcgctctggagcccttcaagttccggcagtggtatctacgatcactgaaccatttccgcacctctctggtactgaggcccgtcacttttgtgagatgttcaacttcgctctgccctgggaactggttccgacagaagctccctttcagagctgacagctgttcatgagatttcttatttttgtagatgctagcatcaaggaaggcttgggaggttatgctggggcaggccgtgaggagcgactgggccgcattgaccaccttcacagctgacgttgtatttgaacacacagtgttaatgggtgccacacctggctgcttggggacggatgtcaccgtgagggggagaggggaacttgttgcttgcaacccattggccatcaatggctgagtgaccagaagtccccctcctgtaccctctggctgccccacaacgtgacctggaagagcggcctggatgagatgctggacattgccagcactggcgacgagtggggtatttagaaccgtaattgtgggctgaggcacagactggatgactgtattgaacatctttttccgggcatcctcaatctcctcaggggaccagctgatcccctgcttcagcctttgggctgtgaaccagatcttgagctgttcttctggatacttggtcaccacagtcaaatagcagagctcggctttggtggggtaggggaacttgtggaaggagttcttcaggaagctgttagagtccatggctgcattgtacgttggaatgctgctcagggggatcatcactttgggaagggccttggccgtgggcagtggctggtggacatggtgttgggcatgcactgggggctgctgctggagggagaggaactgtgctatgccagctggcaaaactggcactgttcctatcaggggcccgttggcggcatgggggttttttgcagagctggcagatgcctggctgactggaactgccccattgatgaaggaatggtccccctctctcacctccatttctccagtcgacagctttggtaaggcctcacccacaggctggctagggacattctccttgagtgtatgaatttttttggcttcagctttgcctttcattatcttcatgattggagttttggtaatgatgatttctgcctgtccatcagccccttcagcactgggctcacccgctaggtcaggagtgctggtgctctcagggatgctctgctccacaaccacatgattgtctggcttggccacgttccacacaaagctggcttccccggagtgacatgtggcattgtgcaaggaaagcccctcaggggtttttgccagaaaactgcacccactgcatacaaaggttgggtctttattaaagtctgtgtgctctgagttcatatgtcccacaaattgggtcatgtcatgggatctgaaatcgcagtatttacaggaatataaatagccatctaaagtgctccgatgcccattggccagtgtagagccatcagtactgctggggttctgtgctgcctcactgctggcagcagatgcttctgggggcagatcctgctggggtccttcaggcaaggtctcagcgggctgggcctccatgctggcatcttgcaacaccacagtcttcactgggatcatgcatggtgtggtggatttcctcttgctggccatggtgacaatcactgggtgatcagcagttgagagcttgtcccataaggggcctaacaatacaagttccagcttctcgatgagggccaaagaaacagtttctaaatgcagctttttcagttgtttgcagaaagcaggttttccctattcaatctaaggaaagggagaaaaaaatgattaagttctcttaagtgctttctgtatatttctcggatacccagacacattccactgcttgccttctaccatctaggtcttttcacagtaagtttaatcagcaacttggatatgaagtctaagttaggaaccccctaatgacaaaaactggaccctgaagaatgacctggggatggtccaataccaactgatagacttaagcaacgtatttttgtttcttccccaccaccccctacatatccctgcattaagtaattcagattaaaaaacaaaacgccctctttttggacctccaaattaattctgaccatgtcagagtgagaacaaaagatcctagtgtaattcttgtttacattttggaccaacacgcggttttcttttcatagccttcccgcatatgagaacaagatgacgcctctgtctgtcccaagccaggcccagggaccaagttagctgcagtgtgtgaacggaaggggtggggtgggcgggggtggctaggaagaccggctgctgtaagagccaggcctctgtagcctttccttgcctgccgcacttattccaggccacagaaaagcgatcaccttacagttactggctgttatgtatcccggaccactgttactgagatgaaaccaaaggtcagagggtcagggaatccacagaaccagtttgtggcccagcaagctatacattttctgtgtacgaccactcaaagggtggtctcaccttgagatctgagaacagttggactgcctccccaagtgggtccctgacccctgagtagcctaactgggaggcacctcccagtaggggccgactgacacctcatacagctgggtgcccctctgagatgaagcttccagagggaggatcagacagcaacatctgccgttctgcagtatttgctgttctgcagcctccattggtgatacccaggcaaacagggtctggagtggacctccagaaaactccaacagacctgcatctgagggtcctgactgttagaaggaaaactaacaaacagaaaggacatccacaccaaaaccccatctggacgccaccatcatcaaagaccaaaggtagataaaaccacaaagatggggagaaaccagagcagaaaagctgaaaattctaaaaatcagagtgcctcttctcctccaaaggaacgcagctcctcacctgcaatggaataaagctggatggagaatggctttgatgagttgagagaagagggcttcagacgatcagtaataacaaacttctctgagctaaaggaggatgctcgaagccatcacaaagaagctaaaaaccttgaaaaaagattagatgaatagctaactagaatgaacagtgtagagaagaccttaaatgacctgatagagctgaaaaccatggcatgagaactacatgacgcatgcacaagcttcagtagccgatttgatcaagtggaagaaagagtatcagtgattgaagatcaaattaatgaaatgaagcgagaagtttagagagaaaagagaaaaaagaaacgaacaaagcctccaagaaatatgggactatgtgaaaagaacaaatctacgtctgattggtgtacctgaaaatgacagggagaatggaaccaagttggaaaacactcttcaggatattatccaggagaacttccccaacctagcaaggcaggccaacattaaaattcagaaatacagagaacaacataaagatactcctcgagaagagcaactccaaaacacattaattgtcagattcaccaaagttgaaatgaaggaaaaaatgttaagggcagccagagagaaaggtcgggttacccacaaagggaagcccatcagaataacagcggatctctcggcagaaactctacaagccagaagagaagtgggggccgatattcaacattcttaaagaaaagaactttcaatccagaatttcatatccagccaaactaagcttcataagtgaaggagaaataaaatcctttacagacaaacaaatgctgagagattttgtcaccaccaggcctgccttacaagagctcctgaaggaagcactaaacatggaaaggaacaactggtaccagccactgcaaaaaacatgccaaattgtaaagaccatcaatgctagaaagaaactgcatcaactaacgagcaaaataaccagctaacatcataatgacaggatcaaattcacacataacaatattaaccttaaatgtaaatgggctaaatgcaccaagcagacctaactgacatctacagaactctccaccccaaatgaacagaatatacatttgtctcagcaccacagcacacttactccaaaattgaccacatagttggaagtaaagcactcctcagcaaatgtaaaagaacagaaattataataaactgtctctcagaccacagtgcaatcaaactagaactcaggattaagaaactcactcaaaaccgctcaactacatggaaactgaacatcctgctcctgaatgactactgggtacataacgaaatgaaggcacaaagaaagatgttctttgaaaccaatgagaacaaagacacaacataccagaatctctgggacacatttaaagcagtgtgtagagggaaatttatagcactaaatgcccacaagagaaagcaggaaatatctaaaattgacaccctaacatcacaattaaaagaactagagaagcaagaacaaacacattcaaaagctagcagaaggcaagaaataactaagatcagagcagaactgaaggagatagagacacaaaaaacccttcaaaaaatcaatgaatccaggagctggttttttgaaaacatcaaaattgatagacagctagcaagactaataaagaagaaaagagagaagaatcaaatagacacaataacaaacaataaaggggatatcaccaccgatcccatagaaatacaaactaccattagagaatactataaatacctctacgcaaataaactagaaaatctagaagaaatggataaattcctggacacatacaccctcccaagactaaaccaggaagaagttgaatccctgaatacaccaataacaggttctgaaattaaggcaataatcaatagcctaccaaccaaaagaagtccaggaccagacagatccacagctgaatctaccacaggtacaaagaggagctggtactattccttctgaaactattccaatccacagaaaaagagggaatcctccctaattcattttatgaggccaacatcgtcctgataccaaagcctggcagagacacaacaaaaaaagagaattttagaccaatatccctgatgaacatcgatgcaaaaatcctcaataaaatactggcaaatcgaatccagcagcacatcaaaaagcttatctaccacgaccaagttggcttcatacctgggatgcaaggctggttcaacatatgcaaatcaataaatgtaatccatcatataaacagaaccaaagacaaaaaccacatgattatctcaatagatgcagaaaaggcctttgacaaaattcaacagcccttcatgctaaaaactctcaataaattaggtattgatgggacgtatctcaaaataataagagctatttatgacaaacccacagccaatatcatactgaatgggcaaaaactggaagcattccctttgaaaactggcacaagacagggatgccctctctcaccactcctattaacatagtgttggaagttctggccagggcaatcaggcaggagaaagaaataaaggttattcgattaggaaaagagcaagtcaaattgtccctgtttgcagatgacatgattgtatatttagaaaaccccatcgtctcagcctaaaatctccttaagctgataagcaacttcagcaaagtctcaggatacaaaatcaatgtgcaaaaatcacaagcattccaatacaccaataacagacaaacagagagccaaatcatgagtgaactcccattcacgattgcttcaaagagaataaaatacctaggaatccaacttacaagggatgtgaaggacctcttcaaggagaactacaaaccagtgctcaacgaaataagaggacacaaacaaatggaagaacattccatgctcatggataggaagaatcaatattgtgaaaatggccatactgcccaaggtaatttatagattcaatgccatccccatcaagctaccaatgactttcttcacagaattggaaaaaactactttaaaggtcatatggaacaaaaaaagagcccacattgccaagactatcctaagtcaaaagaacaaacttggaggcatcatgctacttgacttcaaactatactatactacaaggctacagtaaccaaaacagcatggtactggtaccaaaacagagatgtagaccaatggaacagaacagagccctcggaaataataccacacatctacaaccatgtgatctttgacaaacttgacaaaaacaagaaatggggaaaggattccctatttaataaatggtgctgggaaaactggctagccatatgcagaaagctgaaactggatcccttccttacaccttatacaaaaattaattcgagatggattaaagacttaaatgttagacctaaaaccataaaaaccctaggagaaaacctaggcaataccattcaggacataggcatgggcaaggacttcatgtctaaaacaccaaaagcaatggcaacaaaagacaaaattgacaaatgggatctaattaaactaaagagcttctgcaaagcgaaagaaaccaccatcagagtgaacaggcaacctacagaatgggagaaaatttttgcaatctacccatctgacaaagggctaatatccagaatctacaaagcacttaaacaaatttacaagaaaaacatcaaagaaccccatcaacaagtgcacaaaggatatgaacagacacttctcaaaagaagacatttatgcagccaaaagacacatgaaaaaatgctcatcatcactggccatcagagaaatgcaaatcaaaatcacaatgagataccatctcacaccagttagaatggcgaccattaaaatgtcaggaaacaacaggtgctggagaggatgtggagaaataggaacacttttacactgttggtgggactgtaaactagttcaaccattgtggaagacagtgtggccattcgtcaaggatctagaactagaaataccatttgacccagccatcccattactgggcatatacccaaaggattataaatcatgctgctataaagacacatgcacacgtatgtttattgcggcactattcacaatagcaaagacttggaaccaacccaaatgtccatcaatgatagactggattaagaaaatgtggcacatatacaccatggaatactatgcagccataaaaaatgatgagttcatgtcctttgtagggacatggatgaagctagaaaccatcattctgagcaaactatcacaaggacagaaaaccaaacaccacatgttctcactcataggtgggaactgaacaatgagaatacttggacacagggtggggaacatcacacaccacggcctgtcgtggggtggggagagggacagcattaggagatatacctaatgtaaatgacaagttaacgagtgcagcacaccaacatggcacatgtatacctatgtaacaaacctgcatgttgtgcacatgtaccctaaaacttaaagtataatttaaaaaagaattataagtaatcttcacatatgcttttaagtatttttttaaaagaaaggaaagaagaaagaagaggaaaccagaaacaaataatcattacactatccagacattacataacatcccttacctgtgaatttagatgtattgaacttttaataaaatagattgacttcacacttttaaaatgctaagaaagaaaacagctaaggcagaaaactaacctgaaaacaaaaccaatggttttatatataaaagaccgaaattaaacagttgataactcaaaaagaaataataataataattgtttcacaggatgccatgagaaaagggattctgtgagccctattactaatatagaatgataatcatcattattacttttcgttttagcaaatcataatgctctaatgactaaaacaatagtaattctaatactaaaatcaagttatcagtatttggatttgatacaaagatgtaaagaaaattaaaatatctctattcaaattctcagtaaataaacacggctattttatgatgaaaataatttttaaaactttgaaggtgagggtaaacataaacccactctaacaacttctcaccccttcccccaccaatttgaactggcatgcacacttttttacttaatttttaattataaagataaaatgtaatttaaataaatttaatgtctataatttggtataccttctcatttagtccagatattttattcatatttttatcacaatgagcacacatttgtgcttttttcaccaaacattacgttataaacctttttgttacacaagcttcataagtttaacatttaatagctacctaataatgtaccacaatgaatttgacttatccacccctgctgttgaaaagcatgccaatctcatgggtgacagtgaaacaaacatctctgggcatacaggatgtttttcttctatcaaattatttcctgaggttaagtgcacaggaatgggcttaccatctcaaagagcatcaacatttctaagctcctttgtatatatcattggcaaacattttaaatcaagtgctttatgatcccaaatcagggaaactaaaaataatacagttatggacccagtgagcaaatcagattttcagacaagttatggaagacatcaagtagaatatctgaaagcacaaacgacaaaagaaaaaacagataaattggatgtcatcaaaattaaaaacttgcattcttcaaaggtcaccatcaagaaagtgaaaagatagacaatccacagaaagaaaaggtttgcaaatcatctatctggtaaagtatatccagattatataaataacttacaactcaaccatagaaagataatttttaaacgggtaaaggatttgaatagacacttctccaaagaagatatacaaatggccagtaaagcacataaaaaactgctcaacatcattagttattaggaaaacacaaatcaaaaccacaatgagataccacttcacacccaccaagatggctgtaattacagcgacagataacaagtatagatgaggatgcagagaaactggagccctcacgtattgctgatgaaaatgtaaaatggtatagccactttggaaaactgtttggcaaacaaaatgttaaatatagagttgccataagatccagcaatttggccgggcgcagtggctcacacctgtaatcctagcactttgggaggccaaggcgggcggatcaccagaggtcaggagttcaagatcagcctgaccaacatggagaaaccccatctctactaaaaatgctaaattagccaggcatgttggtgcatgactgtaatcccagctactcaggaggctgaggcaggagaattgcttgaacctgggaggcggaggttgcagtgagccaagatcatgccattgtactccagcctgggcaacaagagctaaactgtgtctcaaaaaaaaaaaaccaaaaacaaaacaaaacaaaaaaaacaaaacaccagcaatttaattcctaagtatatacacagtataaataaaaacatgtccaccccaaaatatgtacacaaatgttcacagcagcattattcaaataatggccaaaaggtggaaacaacccaaacatctatcagctggtgaatgggtaagtaaaatatgatatatccatacgatgaattcttcagccatgaaaaggaatgaagttctgatgcatgctgcaacatggatgatcctgatgctaagtgaaagaagtcagacacaaatgtcacatactgtatgattcccatttatatgaaatatccagaaaaggcaaatccatagaggcagatagtagattagtggttgccagggactgagagtaggggagaagggggagtggctgctaatgagtcaccaggcaatgaaaattgttctgaaattagatagtggggatggctgcacaactctgaatatgataaaaacctcaggaaggacatcgaaaccaagaaaggtagaggacagtaaattatagcactcagttctatagaagagggtcagcatttacatttctaaggtttcaatataggtgacacagttctgtgctacttcctgactcaccttggtaatatttactgtggccctagagaagctgaatggcagtgcctgtgaacatcaggtttgccagaggagagggaagagagatgcagacctactacctggaagtagcaacaacacaaaggaaaaagagcatgagcacaccagaaggccaggcagcagaactcaggagaagctaactgcagagccctagcaacacaacacaagcactccaggcacagggccagaactgctatttgtaatggggactgggattcactgaggaaaaggtatatagtgttcctggtattttacttactaaggctgagaagtggacaacatgaagatggatttgatttttggcaatagtcccaatgtcattcaaaattaagtcttggccaggcacagcagctcacgtctgtaatcccagcactttgggaagccaaggtaggaagatcatttgaggccaggagttcgggattagcctgggcaacatagaaattgtaaaaaattagtcaggaacaatggtgtgtgcctgtagtctcagctactcaggaggctgaggtgggaggatcacctgagcccaagagttcagagttacagtaagcaaggatcatgccactgcactccagccaggatgacagagcatgaccttgtctcttaaaaaaagaaaaattaagtctcaaattagccctaaattatcattcgaataaatgactaagaagggtaccactgctaaccatgttctgggtagatggaccattgactataagcaattacaaaaaagcagtagtggcagcagtggcagccacagccagtgtttactgagtgtttcatattgttggaagtgcttttatacacatcccctcatttcactcataataaacccaagaaaaggcactataattattctcattttacagacaagaaggacaaggctcagaaaagtgcagtgactgcctggagcgcacacaactgggagacgacagaagctgaataagaacccaagcagtctcgctccagagcctgcaacttcaaccactccacacagtgagctctctgagaaacctccagattgttgcaataagggctacagacctcttgaagtaatattttcctccagcatttattaagaaaaagttcaaacaaatggcaaagttgaaagagattgacagtgaacacccatatccccaccacctggatgcttactaaggtggctgtttttagcaacattacccatttaggtaagcttgggtttatttgttatgtatttttaaaggggttaaaaatggtgcttaaacagcaaagttctaattatctagaaaatcattcatccaaaagacactcatggagcatgtctgataaatgaggcactaccatgtggaaacatgctattgtctaagtcaagccctagtgaagtgagctgatagaaatgtaaggtgcggccaaaagagattcagaaggaaaggccaggtgatgtttgcattttgtcatttttgtacaatcctttacatgccccatcttgaaaccttctgccttgtaaatggatctttaaatggggccagagcagtggctcacacctataatcccagcacttggaaggccgaaacgagtggatcacttgaggtcaggagtttgagaccagcctggccaacaacatggtgaaaccccgtctctactaaaaacacaataaattagccaggtgtggtgatgtgtggctataatcccagctatcgggaagctgaggcaggagaatcacttgaacccaggaggcagagattgcagtgagccaagatcgcaccactgcactccagcctgggacacagagtaaggctccgtctcaaaaaataaataaatacaaataaaaataaaaataaataaatggaaaaataaaaacaaaagtgcataactttttttaaaaatctgtctttgggaattggtaattgctcaattcactaaattagcaaagctatagttaatagccactatatttcagcactgcagtatacatatgtgagttttttagataaaaatcttaaagtgtttatctttaaattatagactgaattaggaactttaaaaaattctgaggaatgaattggaagaacagtaagaattcaatgaaggaattcaaatacttagaaagtaactcttgacagactcttccaagcgttatgatagtcagcctgcagccctcttgaacatatcacccagtatttatcattaaaaacggaaataggccaggcgcggtggctcacgcctgtaatcccagcactttgggaggccaaggagggtggatcacaaggtcaggagatcgagaccatcctggctaacacggtgaaaccacgtctctactaaaaaaaaaaaaaaaaaaaaaatacaaaaaaattagctgggcattatggcgggcgcctgtagtcccagccactcaggaggctgaggcaggagaatggagtgaacccaggaggcggagcttgcagtgagcagagatggcgccactgcactccagcctgggcgacagagcgagactgtccaaaaaaaaaaaaaaaggaaataatggtagaagttgacagaattacagaaacataactatagtgggagattttaagataatattctaaagatcaagtggacaaagaaaaaagatgtaaagaatgtgactactatgaggttgatctgacagacatgaatatagtcttgagtattctatagtaattgacttcacattctacaccatgaaacacatttaaaagttactcgtgatgtataacagaccataaataaacctcaacccattccaaaataaaaattcataggtagcattccactatttagtgctagcaacaaagacttactttgaaatttatcctttttactttgtttcaaattatgctctaagtggaaatttctctctcggaaagaaagaaaagtgaaaatccttcctattcacccccagagataaaccattgttaacagtgcagtatatatgatttcaggcatgtttcctaggcatagcttactataattaattcttttaaaaaaccaaaaatggaattgtatttttacatcctattttgaccctgagttttcgtctcacaattatttaatttcaatatctttccatgtcaccatctctagtttacctcagtcttttaaacaacttcagcattctaggttatggatgcatcatagtttatttaaccattctcctgataagagacatttgcatttctccaggtttttaactattacaatgactcggtgaccatccctgcacatatttttatacatttgagaatttctgaaatactgaatttcttacaagtaaaattgcagtagcatttaaaatattgttagcaaaatacaaaattgtctttcaagtaaactgtactgattttcgctgttaccaccaaagaactgaggatgcactcactatcactgcatattcttgctattttcagtctttgttaatttgatatataaaacactaattactagtatttggaatctacatttctttatgagcaaggctgaatatcttttcacatgtcattgacgattttgtataaaattatcttttgtccattttcctatgggatgtcaagtgttctccatatattaagaaaatgggctattctttacctgtcatagatgaaactggggtttcatctccattttttggagcccatctaccacaggaggcagtaaatgacattaaagaattactgttaatgttgctatgtatgataatggtatttcagttatgttacaaacaaaagtcttaatcagttggtgatgcacactcgaatatttatgggtaaaataatttgttatataggatttactgggaggaaaaacccaaccccctagaaaaaaatgagggatgggtagaaatacatgaaataaatttgaccatgaacttataattgttcaagttgggttgggatatatatggctcatatatatgctcttatgtacatttgacattttcataattaaaaaaaaattaaaagctcgagacatattttaaaaagaaatcttgtatcataaatgaagcttaaatttatatttttaaaaaacattctgttttaaatgtttctctcttcccttcctttggaaaatgctgaccttggaaacaaaaatcagatgcagccacccaccctactgctgcccaagccaatcctaagtaaatcagttggcttgctgggaagtttccatgaccgaaaagaaaacagaattcacttcaatttcatcatcaaagtccacgaaagcttgcaaagcacttccatatccttctcaatccatcctcatagtctcctgaattggttattattggccttccctcattgtagtattgaggagctatcgagcaagaaaggggaggtgatatgaccagtcacacacgacatatttttggcagagccagatattctgattctaaattcagtgttctcttttagactatattcattctgaataccaactaaacaatacatccactacctgtaactattttgacatttttttcttacagagggttcgaagattttacaacctgaactattctagtgttttgttttgttctttaaaaaggcttgacaatgtagtcctagctacttgggaggctgagatgggaggatctcatgagcccaggagtttgaggctgaagtgagagctatggttccgtcattgcattccagtaatgtgggcaacagagcaagaccctgtctcctaaaaatgaaaaaagaggctggaccagtggctcatacctgcaatcccagcactttgggaggccaaggagacaggattgcctgagcccaggagtttgagaacagcctgggcaacataaggagactccgtctctacaaaaaatttaaaaaatagctggcatggtgacacgcatgcttgtagtcacagctaattgggaagctgaggcggatgactgcttaagcctgggaggtcgtagctgcagtgagttgggattatgctactgcactttagcctgggcaacagagcaagaccctgtctctaaataaataaataaataaataaataaatggtaaaaaggcttgacagttattatgatccttagtatttataacacttttataccgtcagaagagggtctgtattgcttactcttatgtattaatagagaactcttttaacatgaggcttggtgattagaccacggtaagtcagtaggactctataacaaaaagaacatgtggaaaactgtccttcctcaggaatgtgtgtgggcaggaccttggcagtccagtaagtggatgtgctggttgcaattgtcagatttctgctgaaaacaaaaaagttacaaagaactcaagtctaaatcctcaaatgtcaaagcaatgtcaagcccagagctggcctcaatttgccctctggttacttaagggtcacaataatttctgcatttagtaatcaccatcagccaagggctcaaggctagagctctctacttgtttttccccctcaaacagtgctgttttttttttttttttttttttttgagacggagtctcgctctgtcgcctaggctggagtgcagtggcgcgatctcggctcactgcaagctccacctcccgggttcacgccactctcctgcctcagcctcccaagtagctgggactacatgtgtctgccaccacgcccagctaattttttgtatttttattagagacgggttttcaccgtgttagcgagcatggtctcgatctcctgacctcgtgatccacacgcctccgcctcccaaagtgctgggattacaagcgtcagccaccgcacctggccttccccctcaactcttatttttgtctaatcaccaacagaaatagcccactctagtcagatattatcacctctaaagtaaacattaatttgttctttctcaagctcagaaggtgattgtgatataaatacaaaggcctcagaattaaagagactttagagatcatatattctaaccactcacctttgcatgaattttaccttaagtaccactaccaggtggttaggatggcctatacctgaagatctccaaagatagggagcttggcacttattgacactagaaagatgtttgaaatggttccttgtagtaagcaccaaaaacaacaaaaccttcctataagttttatttgctaaatttgttttttctctcaaatagagttgaggacttactatgtgctaggcactgggtatacaaggatttttgaaaagatgctagctagccctataactcaagaagctaacagtctgttgtggttattaagctatccaccagggctctgggccttgccctccactggatgcattgaatttccctgcctacctgaagttaggtgaaaccaatgaaacgtgaacaaatgtgtcacctccaggggaaaagttttatgagaaagtataggctttgcctcactatttattctctggcctgcaactggttatgttccagatggcggctactctatcagcctgagtcctaaaagaagaacaatagctgacctgccatgtacatgcagtatgaacaagaaataacctttgtcactttaagctactgaggtttttggagtagcttgttactgcagcccatcctcactgatacagagtctgaagacagacaaacaaaatcatcagcaaaatgatcaacaaagtcatcaacaaaatgatcaacaccaatcagacaataagctgagtgttgtagtggaagcatgcacaaagttctgtggagcataggaaaagactttctacccacctctgtcttccggggaacttggggtaaggcctcatagaggaggttgcttttggattagagctcgaaggatgaataaatactgccaagtagataagttgagaaaagagtgttctagacaaagggaacactttatacaaaaaccgtagagggaggagaaaacatggcatgattggagagctagaaaggattcagttttgctattgtacaaatctgaatgtggtagatttcctatgaagctactacagccgaagctttggggaccctcacttcacttgcacaggcaccttccaaagcctctatctaactttatatctttataattttattcttagatttttttcttaggagggtcccctttactaatgttcaagttccacaaaagctggatctgcttgtgatggatcaggttgcaggaataggaggtgattctaggtatacaaacaagatatttgactttctatatgatacagttttttttggttttttttgttttgttttgtttttgttttgttttgttttgaggcagagtcttactctatcacccaggctggagtgcagtggtacaatcacggctctctgcagcctcgacctcccagactcaagtgatcctcccgcttcagcctcccaagtagccagtattacagatgcgtgccaccatgcccagctattttttttttgtagagatgaggtttcgccatgttgcccaggctgatcttgaactcctggactcaagtgacccacccgccttagcctcccaaagtgctgggattacaggcatagccactgtgcccagccgacacatttttcaattggaaaaacgtgattttttggaaaaaaagaatcatgttccctaaaagtcttcttttcccctaaaccaataatcctcagttcctgtactttgtgtgactgggacagagactccacaccactctccactgttcttctctgaatgtgctcttatttgtctatagccttctcaacagtggcatctaaatctaaatctaattctccagatgtagtctgagcgtatttatcaccttccttaaacttactcatgtcatatttaatctttcacaaaagtttttacccaaacgatgccacattatttataatgtgagattcccctgaaaaatatggatcaatgctcttggatttaatccacagcaccaggacttgtaccaaaatacaatacctgcttgtttcaatttaggtttggcagaatttgaggaacaagtttgcagagaaaagatagtcaattcatttaacaaatgtttactaaatgccttttctatgccagacatgccagaatatggggaagacaaaaaaaaatagatagaaatctctgccttcctggaatttacattctagtttgggggagagagataataaataaaataagaaaatgaaattatgtgtcagagcaaaaagtggaagaaaagcatagcagtgaaaggctgaagaaatgtggagcatggcaggggtgagactgcaatttagatatacagtggtcagaagagaactcactgagaatgtgacactggagccaatactcagaggtgtggaagtgagccatctgggtaagtgaggaagcacactccaggcacaggcatcagctggtgcaaagaccttgaggtgagaatgtgcctgacatgttcaaagaacagcaaggaggccagcagagctgggcggcggtagtagagagacagtagtatgagacaaggtcaaagaggctgtggtagggggcagggaggggatccatgcaggtccactgccatgatctgagtctctctgaaatgggcagtgccaagagagggctttgagcagaaggttggcgtcatccgacacgtgtccttcagcatggctctgctggctatgttgagaacagactgtaggaaaacacagtggagaagtagggaaacttgtcagacatcaatctaggcaggagatgacagcagcatggaccaggatggtagagatggaggtaagaagaagtggctggattctggatatgttttgaaagtaaagccgaaaagacttcctaaaggaatggataggaggatgtgaacattgtagccacgggaatcaaggatgactccaagatttttgatctaagcaactagaaggatagtgttgccatcaaccaagataggtttaaacctgggaagctttgtgaaaaaagcaaagcaaatctgtgctgctaaaactagaaggtccttttccaggggaaaaactggattgaactggtttggtcacaagtgttgtaggaaattaatgggtcagactgctaatgagcaaagaggctgtgtagtgccaatgttcccaatgaaaagactctggtctttgccaaaagctgctcaaatctacagagaaactacagaaatgggggttggggggaggctgggaccaaatctagggtattataagagccaagtagttagaaattgcactctctgaggtgtgagacagcgcctttcaaagttaaacatgttactttaaatgtacttgcatcctaaatgttgttccaagtactaagtaaattactttattaaatttaaaactaaacagtaaaaaagaaattgttctggatgtggttttacttctgagattacatttgttttgttttaattgaaattttccagtgtgggccagatagtttacaggctgaatagcttgcaggctggtgagctcacttgaatttctcaagaacatttgttaaaaaaaaaaaaaaaagaaagaaagaaagaaaaattctctctggctgaccactgtggataagatgttccttttacctcttccaggcttagtctgtattgatgattttcttcaatggcctcactacaaagtccagcaagatcttacacacaagaaaaaatgctcaatttcactcacagtaagagaaatacaaattaaaattactctgattatttttctttcacttactttggaaaggcttgaaacattggataataatatcctgagttggcaagggtttgcagaaataggcactctcatacactgcttgctggagtgaaaattggtaagacttctattaagaagtatttaacaagaacaaaattataaaagctcattccctgactcaccagattctgcctctaggaaggcagcctgctgatatactttgcacaatggtaagtcatacatgtataaggtaatctactatcagcatggtaatggcaaaggactggaaataacctaatcactcatcaacaggagataatcaaatcaattatggcacacttatacaatggagtaacacacttgtgaaaaagaacaagggaggtgctttttatgctgctatggattaaccttcaagctatcttgatatatgttaagttttttaaaaagcaaagcacagaataaaaattatacgctagaaatacctcgagaaaaatatgtgagaaactaataatagtgtttgcccctggcgaggggaagagggagatgtgtttgagggaagcttttccctgtagccccttttaaattctgaacaatgttaatgtgctatgtattcaaaacaaaaagttaaaaattgaataaatacataagtggaaaaaatgttagcatatttcccaaaatacatgggttgttacaaataacaagtgagaaagtgagaagctaatggcgtcagagtagaggtccttacagagtatgtaactgggtcaaataccaagtagtgctcctttacatttcaaacttctaatagctacagatgagcttttggtgtaacttctgtaggggtgcatgtgagcacttcacttaaaactatatattatatattgcatttgcctctggccataaagccatagttcaaaaataacttagagatatccaatatacaaaacaaaaaataaataaataaaagaacaagcaaaacaaaaaaaatacccaaaatggaggagtgggacaatatatgcagtccaacttctttcctaattaaaaaatcctgcagcaatctgttatccagtctccaactgagtatctcccaaatgtgggagctaattatcatttatgacaatttattacaaagcccctttcttagttggacctggttcccagcttttagatttgtcttttggacataaatcaactctttttactacatgacgcatcaactctcttttctatatatcagcttttcacacagttgaagatcatttcctcttttagtatttacttctgcagctaagtgtcctgaattcattgcacattctctctatacattctaatttgtctgcatttctcacaaaatgtggcaattagaactgaacaaagcattcaagatgtagcccaaccagaagagaattaaatggaagctgtgttttcatcatcctattaccatgactaatacaaccaaaaactgagctagatacaagttctattctccccctcacagaggaggactttgaggtgaagtgacccagtgggacaaggaaacactgctagaattaaggaggattaggattctttcatcacaaggccatttggatacacgttttcagacactcatttataattccaacagaggacttctgagctatcttcccctttgcctctttgaaatctaccttcttaagaaaggaatgttagactttctctgaacatcctatctaaatgtctttgggggctcccccaaatccaagctgaattattctctatcacagcatcctaattgtttctttcataacatttatcaaaatttgtctggatcttcatctgattcttttcctgcttattgtctttcactttggctaggctgtaagctctgtaagtaaggtcagggcctatatccactgtttccgtagcatatagcacaatgtctggcacataataatcgttttcagtgagtgaatgggtgaataaacggtagctgataatggagttaagactctaacatcagacagagccctaacactgtggactgtgtattcctgggcaaatgacttaagtcctcacaatccatttcctcattggtaaaatgaggagctattaatacctacctcatagacctgacatgacattcggtgaattgataggaagtacacaaaatgatttagcatgctgtctgatatacaggaaacactcaataaatcatagttactgcagctactgctactgttctaattaccaccacatcccactcagaggctggccactgaaggatgacaattaactgtaacagctagaggtacatcagctgttttacccagcctacctttctttctttttaaaaaattgtgataaaaaacacataacataaaattcattgtcttaaccatttgtttttttcttttgagatggagtctcactcttgtcgctcaggttggagtacagtggcgtgatcttgactcactgcaatctccgcctcccaggttcaagcgattctcctacctcagcctcctgagtagctgggattataggcacctaccaccacgcagggctaatttttgtacttttagtagagacagggtttcgccatgttggccaggctggtctcgaactcctgacctcaggtgatcagcctgccttggcctcccaaagtgctgggattacaggcgtgaaccaccgcacccagactgtcttaaccatttttaagtgtacagtaaggtagtgttaagcacattcacattgttgaccaacagatgcccagaactttttaatcttgcaaaagatgcaaatactatacccatcaaataactattccccttactctcttcccccagcccctggcaactaccatactactttctaagagtttgactactttagttacctcatataaatgaagttatatttcaagatgtagcccaactagaagagaatgaaaagcaagctgttttcatcatcctactaccactactaatactaccagaaacctagctagctaaaaaaagtacttatcttgggctgggcgcggtggctcacacctgtaatcccagcactttgggaggccgaggcgggtggatcatgaggtcaggagatcgaaaccattttggctaacatggtgaaaccccatctctactaaaaatacaaaaaattagccgggcgtgctggcgaatggcatgaacgcgggaggtggaggttgcagtaaactgagatcgcgccactgaactccagcctgggtgacagggcaatactctatttcaaaaacaaaagaatttcctttcattttaaggctaagtaatattccatgatatgtatatatcatattttatttatccattcatccactgatggacatttaggttgcttccccctcttggttattgtgaataatgctgcagtgaatatgggtgtgcaaatatctctttgggatcttattttttattcttttgggtatacactttttcttgtttaagctctccacaatcctatgatgctggcagagcagcagaaatcacaggagtcatcaattcgtctttaccttttttgatcctgtcatcaaattatcttcctctcaagctcactccctagtcctttctgataacctcctggttcctctattttcaagtgaattcaacaggtcaaatttaaaatttattttacttgtccaaaagggaaggaagctattatacctttcctatccctttctgttggaagaactctaggttcctcatccagagaagggtactgccccaggtctgagcagaatgaagctgcaggtactcagggtctaagccccctggaacaatagagggctatggctctaccttagtcggcccaggacagtttctaaaatgtttcctttatgagtactgttttgaatgctgttaatatttcatcaggaagtatcagtttcccttgacaggtaagattaagtcctattcactgggttgatcagccttatcattacagccaggatatttctctgcaaatccccttccaatcttatgctgcccaactaatgggaccaactggatttgctcaataaagttctgtattttcccagagctcttcattttcacattattgtcctggggtggggggcagcagaacagagatgttgacagccaaatggaagatgcattgggaggcttctgaagatacttgttctgtctttgagaaaccttagagcatcaaggtgaagcaaaaggaaaggagaggaatagtgctcagtacctgagccttctctaatctaaaacgcaataaagtcaatcataaatcctgaaaatgagagtggctgtgatggtgcaaaatataaaactccaacaactatttatcaggaatgaagtacatatatctccctattcgcatctcagccttcctcctgcaatatgtgagtgagtgtgcatgaacccacactcaccagtgatacactcaggagagtactggggaagagttaacttccgctgcaagatagttagcatatttatttcctttccatgagacttcaggagcctaaatcagaagtttctaagagcttctcttgatgtcatatattctgagaatggatacatctaagaactgatgtaatgtgtctgccattatgaatttggtaaaagttctatttatctgtttttaaacaaaaggactgctttaatgttacatattggtttgttattacatattggctggttatttgttattggttgtttctatgacacacttggacaagaaaatttctagtccaagtatatcatagtggtattacttgagacaccacttaaatctcataaaaatagaaaagatcccctaactggcctctcccatcttccccctcccccatgccagactgcctctgtcccacttattcaacttccttgctcatcaatctttggtgcattgcaggccccattccttcctctccttctgcccaaaccacttgcaccaaggtcatcagtcaagtggctctttcctactccttcaagtctcaaaccactcaggacccaaaggaagttaagacccacacctctataacctctccaaagggagcaaactcatgcccaggactttgcaatctcctctacccaagagatttccaaatcacccttgccagccctgacctatctaccaagttccaaatccattacttccaactgccattgatccctgcaggttttaaaaaactacatgcataaatttctggctccgttgaccctggcactcacccttccaaaaaacgaaacaagcaaataaaaaatatagcctaggtctacttcctaaatcttcatttcacctctcaccatttgtcttagtccgttcggggtgctataacaaaaacatcatagactggatggcttataaacaacagaaatgtatttctcacagttcttgaggccaggaagtccaagatgaaggtgctggcatattcagtgtctggtgagggcctacttcctcatagacagacaacttcccactgtcctcacatggcagaagggaccagggagtgtctggggtctcttttataaggccactagttccattcatgagagctctatcccagtgacctaattaccctccaaatgcctcacctcctaagacaatcacattagggattaaaatttcaacacgtgaattttaggagatacattcagtccactgcaccatacatccagatttccaagcatacttatttttttcctagtttcctttattcacatctctcttttctcttttcccacatgaaatgttaatggtctcggaagcacttaacatcttttcttggtagagggacttttagaaattgtggtaaaatacacataacataaaatttaccatcttaatcatttttaggtggagagttcagtagcattaagtattaacacagtcacattgttgtacaaccatcatcaccatctgcctccagaactctttgccttataaaactgaaaccttacacccattaaacaataactcccatttcctgcccacccctgactcctgacaactaccattctgctttctgtctctgtagatttggctactctaggtattttacataagtggactcatatagtatttgcctttttataactgatcaatttaacttagcataatatcctcaagtttcatccatattatatgtcaggatttacttccttttaaaggctgaataatatccccctgtatgtatatacaacattttatccatctatcaatgaacacttgggttgcttctaccttttgcctattatgaataatgttgctatgaacatggacatacaatctctttgagtccctactatcaactcttctgggtaactacccagaagtggaattgcttaatcacatggtgattctatttttaatttcttgaggaattgccatactgttttccataacagctgcaccattttacattcccaccaacagtgcactgagttcccaagagttctccacattcatggcaatatctgttattttctttttttttcttcagagttgccatcctaatgggtgtgaggctgtatctcactgtggttttgatttgtattgcctaattatattaacgttgagtatttttaatgtgcttattcatttgtgtatcttctttgaataaatgtctattcaagtcctttgaccattttaatcaggttgtctggggttttttgctgtttttgttgggttgtagaaattctctatatgttctagatattacccctttattagatatatggtttgcaagtgtcatgaagcttttctcctctgtcttcttctaagcattttatagttttagatcttttgtttaggtcttcgattcattttgagttaacttttatatatatggtgtaaggtaaggatccaactctattattttccattagatagccagttttctcagcaccatttgttgaaaagactgtcctattcccattgaaaggtcttggcatccttgtaaaaaatcatttgaccttatgtgtgaggatttgtttctggtctctccattctactccattggtctatatgccttcattaacaatttttaatattaaatagatgttgaaataatattttgcatatattgggttaaatatattcttagattttttttttttactgtttcaatgtggcccataggacacttatcacgtattggctctcattgtatttctgttggacagcactgcctagatgcttcagactggagccaccgggcagtgtggagagcaacagctaacgtcatgggattagatgatcatctgaaagctcctctcctcttgtgtttatcattatagtacttagggagcaggatatcactgtggctgagaattgaggcttctgagtcaggcaagtccaggtttcaagacctgccctgtccaacacagcagccactagccataggtactcatgtatgtactgagtatctgaaatgtggctaatgtgaattgagatgtactgtaaatgtaaaatacagaccagatttcaaagactcagtaccaaaaaaagtaaaatatctagttaataacttttatatcaattacatgttaaaatattagtatttctgataaattgggttaaataaaatgtattattaaaattaatttgacttgtgtttcttagtaggctattttttagatcaagttcacagcaaaactgaccagaaggtatagatatttcccatatacccactgccccacacatgcatagcctactccattatcaacattccccaccagaatggtacatttgttacaactgatcaatctacactgacacatcattatcacccaaagtccacagtttacattagagttcactcttggtgtacattctatgggtttggacaaatttataatgatatgtatctacaatattataatatcatacaaaatagttctactgctctaaaaatcttctgtgctctgcctgttcatccctccctcctccctaactcctggcaaccactgatcatttactgtctctatagttttgcctttttcagaatgtcatatagttggaatcatacaggtatgtagcctttttggattggcttctttcacttagtaatatgcatttaatctccccccattgctttttattttttgacttgttaattttgattttttaaaaatgtggctcctagaacattttaaatgacatatgcagctcaccttatgtttctgctgaacatttctcagcttggcatgggcagtttttctcagcatggcatcttcctgtctttccagtcactcaagtccaagcctggttgtacttggtttgctgcaacctaaacacaccagcctccttgccttcacacatactagagttccttcattagagttttctttaaccccctccctcacctgaagactaattcatgctcagacccaattcaaatacgacatctttagtgaagcctttctaaacttccactgtacctaaatcattttttatagcacattctaccttataatttttttgtatgtggctgactttctctccagattgtgaaatctttgaattaggccccatgttttgttcatctttgggtcctcaatccttagtacagagcctgacacatggtaggcaatcagagatgttaagttaataaatgaataaaatgcaggaaaattaacatatcctctaataagagataacatattcacttagaatcaaatagcttagaaaagaacctcaaatgccataaacaagggtgtaaaattctatcagccaacagctaaaattattcacaagctaaaatttgtattcagtcaaagcaacacattaatcaataatatttataaagtatatcacagtgaaaagatggtaaagcacctcctaatggttaatgatagtgattggcctggagatgtggaaactagctatggaaactagatggttaaaacaaccacattccgtaccattagacgctgacagcccagaccccaccaaaatagaggcagtgaaacagcctttgaagttgttttcaaaggaagccaccaagatgattaaagggttggaaaatgagatttatgggtaatggccacagaaacgaagacaattttgcctaggcaagagaaaaggccgaagggtgacttaataaccatcttcaatcattgttattacacagagaatgatgaccagatggtctccattttcaccagagaaagaatattgaaaatggacttacgctgcagcataaaaaaaaaaaaaaggtctagttttaaacaaagaactcaatggttaagaactagtatacagcaaagcagacctggggagtgtgtggtgtagccatgtctgaactcatctgttatgctgggaaagcagcaagtgggtagggtgtgttcaggtcttcaacagtcctttgttgagggcaaattctcaactggctagtcctcaaatgaatcacgtagcatacaaccacaggagtggaaaagaaagagatatgaaaattgaaacacagcaccctctggtgtacatagctgtcttctaatctaggaaaattcttcttttttttttgagacggagtctcgctgtcgcccaggctggagtgcagtggcgcaatctcggctcattgcaagctccgcctcccgggttcacgccattctcctgcctcagcctcccgcgggggactacaggcgcccaccacctcgcccggctaattttttgtatttttagtagagacggggtttcaccgtgttagccaggatagtctcgatctcctgacctcgtgatccccccgcctcggcctcccaaagtgctgggattacaggcatgagccaccacgcccggctggaaaattcttgatatgtatcagtatttttcaaaatgtaagctccaaaccatgacagagtcaggagaaacttacacaaggctggtcttagggttcgtttaatcgctacatccatctttatcaagcacctgcgatgcatttctccctgttaccaggaggtaccaggaagcctgttacacaagcaacctcaacttctgcctatagcaaacttggattcttcccaatcaccttttgaatgctgaattcagactctgatacaactagctggcacatgaccatgcaatgctgagacatgataacatctgccagataatgtgaattttgccctgtgttcaggagtacattacatataaaagttaagcaacacctaaatgggggtgttcccttagacattctccctgctatgttgtggtgtatacacccttctttactgatctctgtctgccaaatcccagccggccactttttacatcctcctaggctttatgctgcaaaaccttcctaatatccttttaagtacaaaagacattcaatgagctcaaaaagtttgagacccaatcaagaatcttttgcagccctctcagtatctttagccatcttgttgccagatgggaacttcattcacatgacacacatacttccttcatgtgactcaccattgctaagcaactggtatgtcctaggtgaataaaacatatgccctgtgtctgagattcacagtgcagtaggggaacatggatagatacgggtgtaaatagatcagctgaagcatgagttgaagctcaaggctctacatgccaagaacagaggaaaaaggcaatggagagaccggacaagaactatcaggacatcagaacagaacttacatcctgtgagagcaggacttatgctaaaaacaagtcttaaaggatgaaaagaagttgtccaggcagacaagacaggaatatgtatcatcctaggcataaagtcccaagacatgtcaccttttgaagaatggagccatgtggcacactgtcctccagtcccaaaggtctccttgaagagacatgaaaatcccacctgaagaactcacccttgcagattgtacatagcacagacctaaatggcaacaaacaagcaaacaaaaaacgcagtacagactaggcactgatctgatggaagcgagacaggctggagtagcaaagggtctgactaagaagcttaggaggaattcctctgatacccttcttggtgccccctccccagcaacatctaacagcctcactcgggcccaacttccctgttgcactggtggcactgcattgcaattgtgggtacaagattcctcccccacaaaactgtgggctgaggcaagagttctacctttttattactacgcctctgacactcagcacatatgaagcacaagcaaaatttgatgactaagctaagtaattagttcatatgtgtgattagggtttgaaagggcagaaccttggacctatgatcccaaatacctttgtctatctagttcacctggttttgttcctcctcagaagccatctatcctccttaccttggttcatgttttcctatctctccattttatacacataaaccaactcctaccctcaaatcagggaaaagggacagatattcctgtcctcaagttaagagtgacctatgtcaaagtgaaaaacaactaagccaaaaaggtaacagggaactggcttcttgagcactcagaagaatttgagattactgcctcgcgagggaaaaagggaaacccaacccgattacagtgtaaaaataggtcactgcttgaatacagccctttggttactggctgcaagcccctttttgcttttgactccagtgtcacaagaaagtggcagcatagtcttagaataagggctccacagccagctggctgctcggccaggccttcctgctggcattctagaagcagcatgcagggccaggcacctactggggagctcagtaagcctttgtcactgctgacatgaaatacaagagttggtaagtttctttggttttgttttgaacaaactggcagatagttcaaggttgtccttgtaagtctctctcacttgcattcagctatacattgtttagtaggaaatgagtatagttcagctagttcacttatccccatgccaaaccagcaggcagcctcttttccatgagagacagttataattttgaattattgtaatgctgtacttgcagcaaactcggtgtgtgtgtgtgtatgtgcacacatggctgggagtggggggtagtgccaaaatgttggttctatggcaaacaacaacaacaaaacaaacaaacaaaaaaaccggctgtgtatagctaaaaaacatggccaagaaaaaggtagaatagaaaacatgttttattatcctgatactaaagcctggcagagacacaataaaaaaagagaattttagaccaatatccctgatgaacatcgatgcaaaaatcctcaataaaatactggcaaaccgaatccagcagcacatcaaaaagcttatctaccatgaccaagttggcttcatacctaggatgcaaggctggttcaacatatgcaaatcaataaatgtaatccatcatataaacagaaccaaagacaaaaaccacatgattatctcaatagatgcagaaaaggcctttgacaaaattcaacagcccttaatgctaaaaactctcaataaattaggtattgatgggacgtatctcaaaatagtaagagctatctatgacaaacccacagccaatatcatactgaatggcaaaaactggaagcattccctttgaaaactggcacaagacaggaatgccctctctcaccactcctattcaacatagtgttggaagttctggccagggcaatcaggcaggagaaggaaataaagggtattcaattaggaaaagaggaagtcaaattgtccctgtttgcagatgacatgattgtatatctagaaaaccccatcatctcagcccaaaatctccttaagctgataagcaacttcagcaaagtctcagcatacaaaatcaatgtgcaaaaatcacaagcattccgatacaccaataacagacaaacagagagccaaatcatgagtgaactcccattcacaattgcttcaaagagaataaaatacctaggaatccaactaacaagggatgtgaaggacctcttcaaggagaactacagaccactgctcaatgaaataaaagaggatacaaacaaatggaagaacattccatgctcatgggtaggaagaatcaatatcgtgataatggccatactgtccaaggtaatttacagattcaatgccaaccccatcaagctaccaatgactttcttcacagaattggaaaaaactactttaaaggtcatatggaaccaaaaaagagcccgcattgccaagtcaatctaagccaaaagaacaaagctggaggcatcatgctacctgacttcaaactatactacaaggctacagtaaccaaaacagcatggtactggtaccaaaacagagatgtagaccaatggaacagaacagagccctcagaaataatgccacatatctacaaccatctgatctttgacaaacctgacaaaaacaagaaatgggggaaggattccctatttaataaacggtgctgggaaaacgggctagccatatgtagaaagctgaaactggatcccttccttacaccttatacaaaaattaattcaagatggattaaagacttaaatgttagacgtaaaaccataaaaaccctagaagaaaacctaggcaataccattcaggacataggcatgggcaaggacttcatgtctaaaacaccaaaagcaatggcaacaaaagccaaaattgacaaatgggatctaattgaagagcttctacaaagcaaaagaaactaccatcagagtgaacaggcaacctacagaatgggagaaaatttttgcaatctacccatctgacaaagggctaatatccagaatccacaaagaactcaaacaaatttacaagaaaaaaacaaccccatcaacaagtgggcaaaggatatgaacagacacttctcaaaagaagacatttatgcagccaaaagacacatgaaaaaatgctcatcatcactggctatcagagcaatgcaaatcaaaaccacaatgagataccatctcacaccagttagaatggcaatcattaaaaagtcaggaaacaacaggtgctagagaggatctggaaaaataggaacacttttacactgttggggggactgtaaactagttcaaccattgtggaagtcagtgtggcgattcctcagggatctagaactagaaatgccatttgacccagccatcccattactgggtatatacccaaaggattataaaacatgctgctataaagacacatgcacatgtatgtttattgcggcactattcacaataacaaagacttggaaccaacccaaatgtccaacaaagatagactggattaagaaaatgtggcacatatacaccatggaatactatgcagccataaaaaatgatgagttcatgtcctttgtaaggacatagatgaagctggaaaccatcattctcagcaaactatcgcaaggacaaaaaaccaaacaccgcatgttctcactcataggtgggaattgaacaatgagaacacacagacacaggaaggggaacatcactcaccagggcctgttgtggggtaggaggagtggggagggatagcattaggagatatacttaatgttaaatgaagagctaatgggtgcagcacaccaacatggcacatgtatatgtaacaaacctgcacgttgtgcacatgtaccctaaaacttaaagtataattaaaaaaataaaataaaataaagaaaatatgttttattaacaaacagcatattttataatggcggtgatcaatatttattaaacacaaggttctagagggctcttctggtaggataattctaagaaagaggttccagatgtcaacttacatattcccttataaaacacagccctggcttacacagtatctggtgtacatgtctcttctctccaatgaactataagatctttgaggtaagggttcagtgctgcaccactcagctacactaatggcaatgtgcacacagtgagcactcattaaatacatcagttacagttcacttgcagttgcttgcttactaccaaaaaccggggtcaatcattataagcattcccatccaacacccaatttgttgcatggggaatgaacttcagtttgggtcccttgctattaaagcactcaatacccattatttgtttgcatttatgtcgaactcatagatgcaggatctgaaaagttaaatgaagcttaacataggcatccaaataaaattaattagaatttatatctcaactatttctaacagagtttgagtaacaagactcaacagaaggaaaacagggtaataacagagactaagagggaaaaaaaggaaggcagcagggagtgaaggctggagaagagaagaaggaaggaaaagaaggagggacagagggtggaaacatctatctaagcaagagcttcttcctcaagtcaaaaatttctgcaaaaaacaacatctttttggacaaatttacatgatgcttctaacatctgctcattgtgaaaaatgcaggataaaaacctacaaattcagtatttttagtatttttatctaaatttatatttcatcaaaacaagataaatttgaaaaatattaatacatatataggcaagacatttccttactttgcggaaatatgctcacataaataatccattctttgccaaaatagagcccttccaacacctgttccccaatctccaaggcagggtcttggtccatgggttagaatcactaaaacacacaaaatacaaggaaatgtatctattaagcaccatttggattctaagatgcaagtaagaaacctaatttgaaagggcttacataataaaggtggtttgctggcacatgcaaatggaaagttcagcggcttcaggttgagtttgagtcagttgctctatgatgaaaacaagggcctattttctctctcttttttttttttttttttttttttttgggagacggagtcttgctctgtcgcccaggctggagtgcagtggcatgatctcggctcactgcaagctccgcctcctgggttcacgccattctcctgcctcagcctcccgagtagctggggctataggcgcccaccaccatgccccgctaattttttttttttgtattttttagtagaaacggggtttcaccatgttagccaggatgctctcggtctcctgacctcgtgatccgcccgcctcggcctcccaaagtgctgggattacaggcgtgagccaccgtgcctggccaataagggcctattttctttctttctacttcgtcaaccacatcctaggggtagcttccctcgtgacagcaaggtaactccagcagccccaagcttcatgtcccaaacatccagaaggacacagagagagggccgtcttggggaggtctatcagaagactgaagagccttcttcccaaagtcctcagcaagcatgctggtggcctgcacaggtcacatgcccagccatgaacaaacctcttggcatgactgccactgggttaatcactgtgcaacaggtgtggggtttacctgactgggcttaaacaatcaagatccatccctggagctgggggtgggaccaatccttctcctaccagaagacagaaacaaacattccctgtttcctatggaagggactggggagggagggagaagagacattgtgagaaggggaacaattagaatgccctccacccttcacctggcactgaatttgaccctgtgattcccagtatcaagggaaaatatggaaatgtattttaagtgacactatttttatcgtttaacaaagacaaatgtttattcttatacagagataaattcttttgaagggaaacccaaggagaagaatgtcttggaactgtgtttaagagaaaataggtaaagcaggaggcttagtttggaaagatgcagtcacactcaataggccattccttttttttttttgagacagtctcttgctctgttgcccaggctggagggcagtggcgccatcttggctcactgcaacctctgcctcccaggtttaagcgattctcctgcctcagccttccaagtagctgggactgcatgtgcatgccaccatgccaggctaatttttgtatttttttagtagagatggggggttttgccatgttggccaggctggtcaacaggccattcctacatggatcctccagaaggcagagcatgggacagtaaatcatatcataatccagtgaagttactttggcagagggctgagatgatatagctcagatgctttcccttcaaatcatcgaacttactgcaaagagtagtaactcacatatcttagaaccccttttttaatgtttatttttgtaggtacatggtaggtatatatatttatgggttacatgagatattttggtacaggcatgtgacgcataataatcacatcagggtaaatgaggaattcatcgcctcaagtatttatcctttgaattatactgttatttgtaaatgtacgattattttctacaatagtcaccctgttgtgctggcaaatactaggtcttattcaatttttttgtacccacgaaccatccctatttcccccccgtcactcaccctactacccttcccagcctctggtaaccatccttctactctgtatctcgataagttcaattcttttaatttttagctccaacaaataactgagaacatgcaaagtttgtctttctgctcctggcttatttcacttaacataatgacctccagttctatccatgttgttgcaaatgacaagatctcattcttttgtatcgttgaatagtacttcattgtgtatatgtactacagttttctttatccattcatctgttgatgggcacataggttgccttccaaatcttggctattgtgaatagtgctacaataaacataagtatgcagatatctcttcgatatactaatttcctttttgggggtatatacccagcagtgggatggctggattgtatgatagctctatttttagtttttagaggaacctccaaactgttctccacagtgggaaattacattcccagcaacagtgtacaaggtgtcccttttctccatatcctcaccagcatttgttacttattgcctgccttttggataaaggtcattttaactggggtgaggtgatatgtccttgtagttttgatttgcatttctctgataaatgatgctgagcactttttcctatgcccgtttgccatttgtatgtcttctgagaaatgtctattcaaatcccttgcccatttttaatgggattattagatttttttcctatcgagttgtttgagctctttatatattctgattattaatcctttgtcagaaaggtagtttgcaaatattttctcccatattgtgggttgtcccttcactttgttaattgttccccttgctgtgcagaagctttttaacttgatgtgattccatttgttcatttttgctttggttgcctgtgcttgtccaggtattactcaagaaatctttgcccacttctgtttcatgggtctatgtgtctgtttttatgccaatatcatgctgttttggttactataactctgtgtataatttgaagttaggtaatgtgattcttccagttttgttctttttgctctggatagctttggttattctgggttgtttgtggttccaataaaaatttttgaattgttttctctatttctgtgaagaatgtcattcatattttgatagagattgcattgactctgtagattgctttgggtagtatgaacattttaacaatatttattcttccaatccatgaattagaccccttatgtatcatatttataaaagtaagctcaagcactttaaaatcatgacctctagagtgttttaaattactgtcattatcagattatcctctgagtgtgcatgtgtgtgtgtgtacatgtgtgcacctgtcattatttcaaattttaaaatatttgagtgctactagatgctcagctctaagagacagggtacaaggaggaagagttcaaaactatagttgtctctgccctcaagaagtgtaacaactactactaccatcaactggataaaattataggatgtcaggcactgtgctttacatttattttctcatttaatttgatcctcacaataaccctatgagctaaatatcaacttgattttccaaattgggaaaccaaggcttgaatggctaagtcatttgactcagtcacacaagcaacaggcaacagcaaggattcaaagccaggtactcccaattccaaagcctagattcttaaccacagcacatctggctgacaagaaaacacaaacatccattaagggtgaggagtagaaagagtatatttacagtgaagagctaagtcctgagatatggagtaaagtggcttaggagaaatcaaagaatgcaaatagggtgaggaggagccacatacacagctgttagctttgtgaaccctgtgaacactgatgcctaactgatcaaacacaatctgtctgctggcctctgacccatgatctactagtgtactatgtctttagccactgacagaatggaaaaccaatgacgttttgacaggccttaagacctttcaaagttatctccaaggatggaatcagctctttccctgatgtggacagacttctattctgttctagacataaggccatatatggaggaagtttgaaatcctctggccaaatactagatagtacttccattgtttaataattaagtgatttttataaccctatccctaagagcatatggcaattgtctttgcccacaggatcaactgtcactaaccttttagcttggtggaaaaagctaaatgtcttataatgtctaaaaaaatgtaataccacttcctctgtgcttgtctccatgtaccaggaagtcgtgggtctaagtggatgtggtgtccctctcatgcctcagcagtccctttacaaagcagcagacttctgggtacccaggtcggggcagacctcccaaccttcagggtatgcttctaggttcccagtgctccaagagagggagaaatacttcctctataaaataatggggagtcagaggcatatgggatttccctttgcttccatgaaattaggagaaagcaccaacactttctagtaattccacagtgaataggatgtgctaccagcccagcatcagtagggcttctcttcattctcaagaagtgtaattacctgacgtggctgcctggaattaagattgccgctatcaaggtaataagaaacagttccattcttccccatgagccaattattatcagggtcacatctggaaccttggcttcattttcccgattcaatccatatttgaatgaccactatggaccaggttctatgctaacatctcactgactcaaacagtcttaggaaatggatattatttctgtcttacctatgtggaagctaaataaagctcaggaaagttatatcttttgtcacagagctggacaattatagttggataccagactgaatctcctgacactatgttctgggctgactccactatgtgccactgactcccgtagtgctgaggtttggggccttataatattattattataataacaatacatgggatttcaatggtcatcctcataatcaagctcttactctactctcaaaggagaaagaacatatcatgttgaagggggctattagaaggcaaatgtggtaagtgctgcaatgaatggacacaagcagtttagaaaccctatgacgaggatcaactctgactggagtgaggatgaaggaaaacttaagagatgtgaagccatccactggggaggagatgcttttgaggttaacagaagctcttaaacacagagttggaagcaggcaaacactaagggattcgtggaccacctcttacatcagggtttctcaatctttttattgacatttagggctagataatcctatgtgctggggggctgtcctgtaaattgcaggatatttagtaacatccctgactagatgcccactagatcccagtagagcacactgtccccaggtcatgacaaccaaaaagtctccagacactgccaaatatcccctaggggacacagttatccctagttgagaaccagtgcctttggtgaagatgtgccagaaactggggattggctaaatgcggaggctggggaggtgcagagcaagaacaggaagccatgaaccagataggaaagagggacagatgtgtgactcaagtcctctcagcaactccctcaggtatggactctgactaccttaaagcaaacggagggtcaggcacagtagctcacgcctgtaatcctaccactttgggaggctgagccagcaggatcacttgagcccaggagttcaagtctagcctaggcaatagagtaaggccctgtatctgttttttaaaaaacacatatttaaaaaaagacaaatggaggcaaataagatcccatgatgagggccctttgatgaatgtccagtaggaccctgattgggagtaggacatttataagtggagaggatggattctagacccacgcagcttggaacagaaaaacccttactctctttctcctttcagtaaatcaaagaaagagaagacaaccagggggaatgctaatagaatagtcataatgaacctggaattcccacgcccatttgggaggattggagaggaactggataaggagaaatactgatgtgtgttgtgtctgtgactgcagtgccatccttaccttctcggccatctcctattccctcacctctcacccttggaagggttttggcccaggaaaagcaaaaggagttgggatacttacttcagggagggaggaaggaaagaaaagaagggagtagagatgagagaattctgaggttcaaaagatatctattgacagtgttcacaaaaaggaccatgtttcccagtaaaaagaaaacaaggtaaagctgaggctggggatgggggttgaggaaagggaaggggcctacaagtaaatgtttacaaaatgcccactgagtgtcaattctgggcaaggcacattgcatgagtcaccaccttcaattttcacagcatcatgtaatacctatatatgaagtggttataacaagctcctttctatagagaaggaaagtgaggttcagaggcatcttcacagactgaggggactcccagcgtggccaggggcttgtttggcagactcctccatgctgtgcctcctcacacttcagcacccacagcctcttgcctcatgcaagctgtagctgcctgcttgtctgtttgctctgcaacattagagcagaggggctctaatctgtgtcaggtgctgtgctttgagttctgtgactctagtatttccttatgtgccaggcacaggccccagtgatacaaagaagggagcaagagttaacgctgaggtgaacaaaggacccatggaagcccagctgtgtgaatttacagcacaactaatgagcacacccagttacataactgcctctcctgctctgctcctatgctcagcagccactagaggaaagcagggctgtctttcttttcctgtgctatatataattccaactgtttgggcagggaaatgtgctacagctccacagctcagttacattagatcttaattttttcttaaaaacctagcaatttctaacagtgatgccacaaagataataatacagtaatcttaagattgagatactttacccacatttcctgcacttttctaccttgaaaacactcattatttctggttccactttgagaagcagcaagcaaggaaagggtgaaaatgtgagatgctgaagagacagcttgcaacattccataattacagccttcaatgctggaacctcaagtctccaatatcaaatggaacagtacttccccttggtatctaactaggagctgatccattaaccaggaatatatttttgatatagagtaggccagttttgtttctggttcttttgcatctcctttcctaggccctaaacacagactccatgacctcatgacagtagaatgaatgctgcataaagagaatcattcattcgtcctgggacttcactgaagatgatttttgcttagtaagcctcttcttcagatataatactaaaaggtatgttttctgagacctattaaagcacacatttactaaaatttacattaagttcatgtcagtcctaaaaggttctctaatttctgaaagccatagtctgttattctaatgtgaattgttacacacacatacagacacaccttgaacattttaaaattacatttatttaagcatactcactcactcatactttttgccaatttggttgggctttcccctaaaccaattcttctaaaatggtgagactttaacaaataaaatgatatagctgatattttcatagggtaataggttaagaagaaaaaaatccaggcttttgaaatactaattgtattagcattaatactaatacctaggccaggcgcagtggctcacacctgtaatcccagcactttgggaggctgaggcaggtggaacacttgaggtcaggagtttaagaccagcctggccaacatgaggaaaccccatctctactaaaaatacaaaaattagccaggcgtcgtggcacatgcctgtaatcccagctactcggaaggccaaagcaggagaatcactcgaacccaggaggtggaggttgcagtgagccgagactgtgccactgcactacagcctgagggacagagcaagactccatctgaaaaaaaaaaaccaaacaaacaaacaaacaaacaaaaaaaactaatatctaaatattagcagtactatgatttatagacatgaactcttataaagagtatgtatatggctgggcatggtggctcatgcctgtaatcctggcactatgggaggctaaggctggcagatcgcttgagcctaggagtttgagaccagcctggacaacatggcaaaaccttgtctctacaaaaatacaaaaattagatgggcattgtggcgtgcgcctcatgcctgcagttccagctacttggcggggctgagacaggaggattgcctgaacccaggaggtcgaggctgcagtgagccaagatcatgccaccgcactccagcctgggtgacagagggagaacctgtttcaaaaaagaaagacttgcttaatactgggcagctcagttatagcaagtactagtcaagggtggcatgtcactgtgttcagagttggatgaacctgggttctaatctggactcagctacttcctagtgtaggtcatttgggtcttgggcaaagtattgaacctcccaaacctcagttctcttttgcacaatggaaatcatctgaatatagacaagatagggcccactataaaaattaaacaagatagtctgtgtggaagtatctttaacaggcattaagtgcctgttaagtgtctttaacaggagaattaagtagcatgttcaggctttttgcctccttcctcttcccctccactccccagtgaccaacttgcaccctgagtaaggttttgcagcaccatccttctcctgtggcttgtaaacctctgcagtaacttcagcaatctacactgcctgcaccctgccctccctgtatgctcccctgaatcacaaccatatttgcctttctagagcacatatcattgtcttcagtgattccctgcaggacaaagtctgcccacttcagcctggtatcatgatcctgtcttagtctggtccaacccaccctttctgaacagttccttacaaacccacatcttcctacctcaactctgcctaggccattcccctgcttcaagctcttacagagcctcccatggcctacagtataaattcctaactgtttcaggtggcatttgagaccgatggtatcaggtccctgcgcctctccagtttcactgtctgctactcgtttccctccttatactttacacccaagcgtaaatctacttatagtacctgaaaccccatgctgggtcatcactcttcagctttacatatactcctctctttgacgagaatactcttctcatccatttggcaaattcttcaacagacttcaaacctctctcaaatgcctctacttctgtggtacagtctgtccagaactgtgtcttgtacatttttctactactttgcacctgtgcctgtcatacaacgatttctccagtttctccggttttttttttgtaattcactgaccattattaatgtcttctctgctaaaagtataacaacactcagctttgcacagagcagttacttgggaaatgtttgcattgctgaacacaggcagcttccaatctcatgggaacatcaaatgaaatgcagaggatacatgctatacaacacagtcaagaggactgaaagcaggcagcaggagaattccacaatattcctgtttaaaatgttaaaatgttggtggctgccagagctcaggaaaagaaaatttttttatgtggttacagctcactctaacgagtcaattacattgacctaaagcccatggtgctcaaaactgtatttctctctccaaaacctcattcttttataaagctccctcctctgtggaatgaatgtgggcaatcgcttttgcagtgtttgacgatgccagtttatggctatgtttttctgttcactgaactggctcatttcttcaggagaacaaactgttctccactgaagcaggaattggctgggttctaacaaaaagatttttcccccctgacagtgtttttgcaaaagacccaagtcaatttatagccaagtaacaaaaggtcagaaaggttagtcaagcaatgggcgtaattcctgtgtgtcacagccaataaaggaaatgggtggggataaatagtatgcaattttaacctgaaattatttgtgcaaaactattcttgtaaactatacaaaattacccatgacttccactatataggatttctcactctgatttttttaaaggtacatttactttggaagaactgagatgacctcaaattcctcattcacaaatggaaaatgttaaaaactttcttcacactaatataagaaaaacttggtcattgttttgcagccctgaaacagaattgttcacataaaaaaaaaaatctcatagttaagtcacaattaaatacaatttgcatgactgaatttaaaataaattgcaaaattcccttgccaaaagggaaacaacattgaccaaaaggataggtcaagaaaagaccctacaaaagtgacagttcctctgttttaatcatgctaaaagtataacaaactactgcattattcagtgagcataagaacaagaaaagcctgcctttaaagcagacacgaagaactgacatcaccagccaagcaagcggaaggcagatgagtaatagcctgcactgggcggccaaccaggcccaggcccatcagtctgtggagtaagaaagcctttcagatatcaaggtcgttgggaggcctccttcccccagttctccaatacaaagtctaatctactcaccatttaaaacaatcttagcatccaaaagatgaatggttaaatagaaccctgtcaccgttcagacaagatggtctaaacccatttctctccccacctccttgtaagcacaactgtaaatcctgaaaataacacaaaaggcaaccaaaggagaagtctgaaagaaaaaggaaggtgaattacttagggacccaggattggaggaacaacatagcagcacatcttatgaccacacccccattcaatagaagaaggtggccgagggtgtttcccaacccccaacctagcaacagagggcagcagaggattgaatgggagttctgccgacaataccaagccagctggaagcaccaacaagggggatagctcaggaccccactaacaataaagcagtctggggaaacacttttccccccaactacagggcccccaggaagcaagctgcatcccagcaggatggagactccctcctctacctagatatcaggcagcatggcctggggaaactccttacccccatcagacagcaccaacagggactagtgggagccgtggcagcaccagataaaccaagtggaccaaaagagtactgcaaaggctctgaaaagtaaatcatcgttggaaccacaagagtaaatcccagctcacatgctgcatctaaacactgtgaccgcctgctaaaatggaagatttaaataggacccagactctcttaatagacaaaatgtccgaagtagattttaaaaaatcacctgttggccaggcgtggtagctcatgtctgtaatcccagtactttgggaggctgagatggtttaatcatttgaggccaggagttcgagaccaacctgggcaacatggcaaaaccatgaagatggactgaaaacagacagaacctccaacacttatgaaacaatagcaaaagatccaatattcatattatcagagtcacaggagagaataaaaagaagggctgaaagagtattcaaaaagataatgactgaaaattccccaaatttgctgaaggacataaacctagattcagaaggtgaacatatcccaaataggataaactcaaagaaatccacactaagacacatcttaattatatttctgtaaattaaagacaaagaataactcttgaaagcagagaaaaacaacatactacctataagggaatatcaagcgacaacaggtttcttatctaaaaccatggaggcctggccgggcacactggctcacgcctgtaatcctatgactttgggaggccaaggcaggcagatcatttgaggttaggagtttgagaccagcttggccaacatggtgaaaccccgtctctactaaaaataaaaaataataacaaataaaattaaaaaataaaaccatggaggccagaaggaagtggcacaacatttttatggttaaaggaagtttttcaaacagaaaggaaatgattaaaagaattctgaagcatcaaaagggaacagaaaacaacagaaaaggcagaaatatggggagatatatatatatatagattatcctcctgtagtcccagctatttgggaggctaaagcaggaatattgcttgagtctagaagttcacttctaccctgggcaacatagcaagactctgtgtcttaaaaaaattaaaaattaaaagggggaaggtaaagggacctgaatggaaatcaggtttccacatttcactcaaagtggtaaaatactgatcatagtagactacagtaagtcacataggtatactgtaatactcagagcaactgctaagaaaataatacaaagaaatacactaaaaaaactattagaaagtcaagataaaaacctctcaaaatgttcaagtaacccagagaaagacaagaaaagaaacagtaaataataaatggcagattaaagctctaatatgtcaataattagcttaaagataaatgatctaaatacaccaactaaaaggcaaagactggcagagtagaataaaaatacaacccaactatatgctgttcacaaaaactcacttcaaattcaacaaaatagttaagctaaaagtagagtactgtctatagaatagatagaatagcaatgcttattttacattatgcttatcatttttgatacagaaaaatatttggataagacatgataaataaatacataaatatcctaaaagtgagatacaaaatatatatatatatataacatggctttacactgtatgtaagcaatttctaaattaatacctaaaaggaatgatatcaagatatcactaagggaatctcaattatcttcattattctttcctatgtttttcagattatctacaataagaaagaatggcttttataacttaaaaaatgttgttttttccaaataaagcagtctattcaagataactgtattgctgcctagggaggaggaaatagtctttatcattgctagccaccattaatgtggatctttctactggtgagttggctgtctatacctgccttaccctccaaaagaccagaggcacagggcagaaggcctgaaagaccaggaaatgtcctcttttcagactttgggtatgggatccagggaggaggggctgggagtgggaaatgagaagttagggagcagagggataggggacaggggctagagagaagacagtacagacagtagagcaggactactggatgcctgcctcacttctagtggtttccagagtcattgctctaggtcttcttaggcctcgccactgagctagttcctgtgttttcttaatccatcacctgagaccatgtgagtacgtcttagtcccctatggcccaacagagccaaacccaggtgtcatcccgcgatgctggtggccacagcccagaagaggaaagtcttcattttatactgccaagtaagtctaactgtaacatgcccatcttatttttcagtttctctctaactttatccaggagtcttgtgacagccttcctaccatataacatgcccaatcccttttctggcattttaagtaagaaattctaaagtaatcttcagttcttcctcacccattacttatatatacaatatattattataaaggagacaacacagaatatagaaggcagatttctaaggtcccctattagaggtttataattcttttataaaatgttatcttttctcttcctcaacacaacaaacgaaccccattaaagtcaaaactgaaaactctggccaggagtctgttatatgtaagatgcctccttgttgatgttgctatagtcctaattaacagtcgacaggacatttcaagacttctcactcttatcaccagtcctggaaaagttgtctttttctataactgaggacatggaatcccatctctagggccacacaggataaaccaaagccaaccttgaccttaaggaaatttgtaaggactgcaggactattttagtgcccccacccttgccatctctcatggtcaaagtaccaacaagaagaggaaacacaattttgcaaatactttagcgtatattatttgagaccacattcacagttaaaataagcttttattttacctgttgtcttggtttttgggactacagtaaaaaaaaaaaaaaaagtatggacttggagtaaaagtgtccctattacttattagctgcatagctttgtagcctctttgtctataaaatggaaataattatgtatatcttttgtgaggactgaataatgtatcacttataaaagttccaggtggtctcctggttccatttaatattcctaccttggtttcttttttccatctacttctcatttatgttttcttcttgtattttatggaccagagtgagtcactttaaattctggtagaacaggatgccatatgaatatacaatataaaaatagtagatattcctctggggagtaggggtgggcactgactgggaagggacatgaggaaactttctgggtaatgataatatccttctaggtgtctgggttttataggtgtatccatttgtcaaaaccaggtccatatacagttaagatttaactacaataaaatgcacacatcttacttccaaagaaaaaacctataaacaaataattacctctacttagcgataaaacatgctgaaatagtgaggggggaatgcatcgaaaatactatgacagatgactagatagagggaaagcaaaatcagtaaaatactgatggctgaaaactggtagtgggtatatggttgttcatggtaataatctttcaattttgcagtatgtttgaaatttttcataataaaatgttggaaaaaaattcctaccaaaaaaaatggaaggtactcaatacttgttagttctcagccaggcgcaatggctcatgcctgtaatcccagcactttgggaggctaaggcagaaggattgcttgagcccaggaatgtgagaccagcctgggcaacatcgcaagaccctgtctctactggaaggagggaaggaagagaggaagaaaactttaatgccatgagggggacactgcaaaaataaaaataaaaatacttgttagttcccttctcaaatcctatccctattgttattcatctatttgcttattcacccatcaacacgtactaggcacacactctagcattgcctggtacaagttgcttaaccccagctcctctgcatctcagtttcctcatctatggaataataattacaagtgcctcacaggatttttgtgaggattcagtgagataataaacatgtagcacttagctcagtgcctgccacacagttggtgtttgagaagtgctagctgttattatgtcattatagcatacaataaggagcatgggcatcacagcagattattccagtatcaagtaatgactagaagccctgactcctgactgcttggcttcaaatgccaactctaccacttattacctttgtagctttgggcaaaattcttaagctgtgtctcagtttcctcatctgtaaaataggaataatacatgtcactctcatagggttatgacaaatgcaattatattgcttatattattttgctatatatgcatatatggcttagccagtagctgaaacagtgtaaacactcaattgatgttagcgaattcactatgctggatactcagaggacataatgatgaatgcctaagtccctgacccctcaaggagttgataacgcaggagacaagaaagcaacgtcaacagagggatcacaaagcagcctataatgaatgtgtgctacaggaaaggtactacaatgggcaggcgatacccgagggagactgataatagtgaggaagaccaaagaagacttcaaggggagagtggcattgatgaactgggacttgaagtcagaaaaggggaagaaaaagcgtgttaaaggacatggtatagccaccctactagagtttaataaaaggtaggtcagggtggtttggaagattcatgcctggaaaggtcaaaaggattttgaaaaaatgatatatatatattttttttgacatggagtctcgcactgtcgcccaggctggagtgcagtggcgccatctcggctcactgcaagctccgcctcctgggttcacgccattctcttgcctcagcctcctgagtagctgggactacaggcgcccgccaccatgcccagctaattttttgtatttttagcagagacagggtttcaccatgttaaccagaatggtctcgatctcctgacctcgtgatccacctgcctcagcctcccaaagtgctgggattacaggcgtgagctaccacgcccggcaaaggatcaactattcttacactccaccaggttcgtagagctaagtcttacaaattaattatatcaaccagtaacttttccttgatttttctaagaaataaatactactcatcatttatccactgcactctttatatagagaaacaaagaattcataaccataaccattttaccaacaaggacatatctactaaataatacgtcccagagcctctagaggaagggccagggaagaggctactaacactgtggtagaatcgagtgagttagtgccactctagttgtttcactactttgaggttacaacttggaatctgactcaagaatttaaattcaggaagggagaggtgtccatgcagcagagaagagttggctccctttggccactgccagctggccatgctgggcctcagagattactatgccttggtaaacacatttctgatttctgtaggcactgagcaaactcactaagccttaccaaagtgttttcaacatcacagcctgaaagaagtggctaggacaggggcaggttttgtgattaaaggcaccaaatgctacttcaaaattatgtaaattaaatatataaagtattaatgaaaacatttttcaacactgttggaaattaaaatagtaacaatttatttttacatttaacttcaagggaaaaataaaaagcaaacttattttggtgtaaaccaagcctttttagcagaggcacctttgagtgaggtaggtgtgctggctgatttaggctcggaggaacaatctccttgtctgtgagctccatgaggacagggaccatgactgtcttgcttactgctatgtttttagggtgtaatacagtgcctggcatataactgttgctgagaaatacccactgacagaataagactagtctccagctttgtaaattgagaatttttttatattcattaagagactattcagttcttaattaggtgagggtagaactgacttaataccaactaaactcgatggagacaaattagattttttcccctcatttttagaaggggtatagctttctaggagcctcactattcccgtaatttacccagagctgtcctatcttaatatcaaagcatctaggaaacagaatcactaatcaggttgctgcataaggaacaaatttagagccccttcggaggttttcaacctgtgtatctagcatgcccagccttgcagcaatcagaatgtctgccccaggccaatatggcatttcccttcacggacagagccaggtgtactcagagtcccacactccaactcctcctagactccatgcagacttcccgtctgctgtccctttgcaccattcttcatctaaacatgttataaaacccttagcttttgccatttttaaaatagatttaggtagtggtgaatctggacttttagcgtccacatcatctaaatagtgtacattgtacccaataggtagtatttcatccctcagccccctcccaccttttggagcctccaatgcctattactccactctatatgtccatctgtacccattgtttagctcccacttataagtgagaacatgcataaacctctagcttttaagatttttctgtgtatagtgcttcaggttggctgcttcctaatgacaaaggaaggaccttcaactacaaatgcctccagaagattgtgtggtcaccttcacatggatgtgcaccaattttcaggccatcttggcctcagcagcaaacactgaggcaacatcttcagagaacttaaggctactaagtggtatcttgggacctgtgattctctataaagctggtttggaatttcttttttccagtaagtgcagtatcttgcattgactaattttctgctatcatagcctcataaaatgttcatgaaaatctctcatcgtagctttccactactgtaccctttaaaaaggtctaggaaattaaacatattggaaaatgagcctataggcagcactgtggacagtcatcattcatattttacccacttatagaaggggatttaaccctaagctttctttcatattcttaatccagtttctactcaggtccaaattcattctctaactccacaatgactcttaaaagtgagatagaaaataagatcttgtcaggatttgttttcttttctttctttttttttttttttttgagacagagtctcactctgttgcccaggctgcagtgcagtggcgtgatctcagctcactgcaacctccgcctgccagcttcaagcaattctcctgcctcagcctccttagtagctgggactacaggcacacgccaccatgcctggctaagttttcgtatttttagtagagacggggtttcaccatgctagccaggctggtctcgaactcctgaccttgtgatctgcccaccttggcctcccaaagtgctgggattacaggtgttagccaccacgcccaaccctttttttttttgagacggagttttgctcttgtcagccaggctggggtacagtggcacagctcactgcaacctccacctcccaggttcaagtgattctcctgtctcagccacctgagtagctgggtttacaggcacccgccaccatgcccagataatttttgtatttttagtagagatgaggtttcaccaagttggccaggctggtctcaaactcctgacctcaggtgatccacccgcctcggcctcccaaagtgctgggattacaggagtgagccactgcacctagccaagatttcttttaaaaaatcattttgagctaattttagagttacagaaaagttgcaaaaatcgtacagagtttccatatatcctggccccagcttccccagtgttagcatcttacataaccattgtatatttaccagaaccagaactttaatattaatactattaactaaaccaaagaccttattcaagtcgtaccggttttttctaccgatgtccctttactgttccagaatcctattcagaatccccgctgtatttagttgttatttatccttagtctcctgcagcctgtgacagttccttgttctttccttatcattcacgttcttgacaacttttaagagtattaaacagttattttgttgactgtcccttgattcgggtttgcctgatgttttctcatgattactctgaggttatgcattcttggcaaaaataccacagaaatgatgttgtgttcttaatacatcatatcatggggctcatgatgttgatatgtcttattgctggtggtgttggtcttgacctcttggttaaggtggtttctgctgggtttttccactaccaatttatgacctctttctttatagttaattaacacgttgaggtagtttgagatgatgcaaattctttcaaagctttcctgaaggactactggctccctcattcacaaacctgctcactctgcttaaaatttccaagagattagttgatatgatttcccctaactatttctgccacacaagcaactctgattacttttgtttgttcagtgaattttacttttcttctgcttattaaaaaaaaaccacattttcattgtttaaaaaaatataattgtggagctctcataaccccaccttcagagattagcactatagataatttgatgtatattccatatgaaccttttttcctcttttaataccaatggagtcagataccatgagcttaaatcacagttccaccatggactttgggcaagttgcctaattttgtgtgcaggtaattctttctttttgggaggccaaagacttctttgtaaatctgatctatagactctcattctcagaaaatgcacaatatattgtacacacgacattttgcatacaactatagggactcacagactaggttaagaacccctattctatttatcacctttgatccacaattctgtttctggtaatctagcctataaaatacttgcacatacaaacatgtaccaaaaacatttcatgtagtgctagtaaaaaattgggaataatttaaacatccaccaacagggaactggctaaattatgatgactccacactatggaataccctacaaagaatgaagtagatacatgtgaatggacatagaaagactcccatgatatactattaaatgaaaacatttcaggactttgcatgactccatttttggtaagatgaagggagagagggatggagagggagggagaaagaagagaaaaagaaaagaattagggagggcatgaaacctatatatatgtaaatgcatagaaaaaaatctggaaagtttcacaataaacccaacatcaatgactctgggagaataggattatcgggtgaattttattatttatttagtctgtaactattatattatttgaactttttacaaagagtacaactttaaaaaccccaataagatttttaaaaccctcttcataggcaacaactctgaatgaatatagattttaaaatgtttaatgactggcagaaataatttaatgataaaagaataaccaaactgataagaattttgcccagaatggaatgatagttcaagatacacatgacacaaaatcaaagagttaaatgagaaaaacctaatgaaactctccatggatacaataatgtaatttgctaatactcatttctaataaaaatactaagaacaaaaggcatataggtaaagaaagatgatataaaacatctctctaagccaaatgtgaaaaaaaaaaaaggcaataaaagacaggccacttttaccatcttaaatagttttgaagttctggccaatgcagcaagacagctgaaataaggtaggcatatatattgcataggaagttaaatatgttatctacagatgagatgattggacaactacaagagcaaaaatagaaatttttggaagagctttttgtaaggtagaaataaaacttttacaaactgtttttaagagacatcacttgaacaatgccatggggtagatgaggtcacatagtggacacttgaactccagatgtcacttctggaccaaggttaaaattgttctttgttgaactccttaaaaacttgagggaatacaacccaattcccaagatttgcctacttctagttcatcaagtaaggctccaacagcctgaaatctatcactatttgtgtggtccaaatgacaatgaggaagaggttatctctcgcaccatttttccctagaacagtaacaacaatggcaacacaagcaactaacaatggtggaacacacactggacacctttctttctaagcactacaagtggtagttcatttaaccttcacaacaacccttggtagtagattctaattttgcctccagtttacagatgagaaaattgaggcacaaaagaagctaataacttgcccaaggttactcagctagtagctggtagagccaggagttaaactcaggcagtctggttccgggcccatgctcttagcactacacaatcctgttgcctaagaatgcacaggcaaattgtcatctacaggaaagatacaatctatgaattagagttctggaggaaactgaattgaacaaaagattcaaatgacagaaggaaactactttcagcatggaaagacctgaaagaagaaacaagaaggcactcccagggtctcacacatcattagcaaagaggatccctgggacatgacctggaaacatctgaaaacaatgtgagaaggaagagagaaaaaaaactccaagtaaacaagttaacaaatagattacatgaaggggaatctagtagagttattttttatttttttaaataacagaagtctagaaatgagacaatctaagatataaaacctcaaagaagctcagcaaatcagaatacctcaagctgtcatctgtaaacaaacaaaaatgatgccacccccagaccaagtggcctcatcattcatctaccaaactgtttcctagagtggtagtcaaactgcatttccttgcctcctgactccagagggagctgacttaggttgtgtgggaactgagcatgctggcattgctggccactgcccctgaaggaaaacacctcttccacaccacttttctgtatctcctctacttctttctctagcatggatgtggcatttgggcctgttgtgaagactaagccagccatctgaaaaagctctagccaccccatgctggacatgtattacagtgctcaatatgttcaatttcctgaacataaagactgatctttgccaacagccaatcctaaggccttttaatttctgtacatgctgtacttgagggattttatctctcttcttatggctttgatatcctccttggtacaagtgagtctcacacctttatctccagccccaacatctcatctgagtttctgatcaatatttccaactgctcctagatatgttttcctagacattcaacaagtcctaaaataaactttcccctgcttctctgcaaattagtctctgcacccaatccacaccctttatgccactccccaagttggtcagtagttccaccatctatcaccaccttccctaaaactaacaaacaaaaactcctctgaggcatgccctaattcccaatctccaccatggcaggcattggtaattttagattctgccccgaaattcctcatatctcctcttctccatcatcactgctatctccttgctcaagttgttctcacctcttatctggacaactgccacagctgcttaactgatttccctccctgcaggctgtgcttcacatgacagcaagaattatcttcctaaaaaatgaactagaacatggcactcccttgctttaaaccctctggtacagaccacaggatacaaactgaaacttgtcgcccaacattcaaggtgcttcagaatctggccccaacatcccttgtccagcctcatctccatcatctccagccactatcccaagaacagggtgatgtacctgtgcaccttcagacttttgccctctcactttatcctctttctcacaaagccctgctggtacatacagtaacatttagctcccagggtgcctgcactgactcaccaaacaccactccctctctctttctctctctctctgtatccagtacacctgacacatcacatcttttgccattgttggctgatttgcacatcatgccacctcatcaaccttgaaggcagggacagaattgcctttacttttgtatctcctgcacccagctcaggatctgttggctcagagtgagacctcagtggttgttaactaactgaatcaaaaaatagcaaaatacttatgagtaccaggctgaggctcagaagaattaagacacttcacagaacaaacattaaggggtgaaaaaaaaattggagagatagggtagataaggaataggaagagaagatgccaaaaaaggggcaaattaaatttccttatatggaagaaaaggcaagttcttgcttttgctttgattttagtaaataaattcagaaaaatatgtttagcactaagagatttgaaagattgttcacctttaaaatttgtttaaaagctaaagaaagcaaagaatgttctgtaatacagaagacataatggagaagaaacaacaaatacaaaaacaaagaaacatacaatatacagaaaacataatacaatagcaataataaattaaagagtataaattcccatataagatatagaaccttcaaagataagttaaacagacaaaatccgacaacattctgtttgcaagataggctatgaaataatgataatgaagttggaaaatgtaacaaaatcattacataagaaattatagaccacgaaaaaagaatagagagcagtattgctttctgtgctaccgaaaaataaaaataaaaactaaatacacaactaataatcttgagaaacaaacagaagcattagaggaatttttttttttttttttgagatggagtctcgctctgttgcccaggctgcagtgcagtggcgtgatctcggctcactgcaacctctgcctcccgggttcaagcaattctcctgcctcagcctccagagtagctgggactacacgtgtatgccaccatgcccggctaatttttgttttgtattttactagagacggggtttcaccatgttgctgaggctggtcacgaactcctgagctcaggcaatctgcctgtctcagcctcccaaagttctaggattacaggcatgagccaccactcccggctgaggatttttttttaaaaaagaaataaattagatattttgaaattgaaaaccaaaaaacttttgaaggattcataagaaactgacaggagctgctgcctaagagaggggagctatttggccaaggaataacaatgaatgggaaactgacttttcactacatccttttgtattttttaaagttttatatttcaactaaaagttgctgtgaatagactaaaattgatactactggcaagtgcaaaaaaaggaaacataaaattggaaaaacaggacacaaaaagaagcaataaaattgtaagagaatatgtgtgttaataaatttggataaaactaaatagatgagtttttaatcaaaaatgtaaaattctaacactggcaaaaataaaatacctaaccagaccaacatcttttaaaaatcaaataactaggccaggcgcggtggctcacaccagtaatcctagcactttgggaggccgagacgggcagattgcctgagctcaggagttcgtgaccagcctcggcaacatggtgaaaccccatctccactaaaatacaaaaaaaaaattatgaggcattttggggcagaaatcccagcactgtgggaggccgaggcgggtggatcacgaggtcaggagttcaagaccagcctgaccaacatggagaaaccccgtctctaccaaaaatacaaaaaaaaaaaaaaaaaaaaaaagttagccgggcatggtggcacatgcctgtaatctcagctacttgggaggctgagatgggagaatcacttgaacccaggaggcagtggctgcagtgagccaagatcacgccactgcactccagcctgggcaacaagagtgaaactccatctcaaaaaaaaaaaaaaaaaaatcaaataattatacccctaaaaagtagtcaattctttcagtctccaggaacaaatgattcatgttatagaaatcatgccaaaaatggatcaagatataggttatctaattattctactaatctgaccctaaaactggctaaaagaaacggaaagagagaaaactatacacaaagcacacaaagctcactccgaacttacgctcaaaaatttaaaagaatagtaaatagaacctagaaacagatttttaaaatttttatttgtgtcaacagaaataaaaacattcatttgttaaaatctaacacctattcttaattttaaaattctaaaactaataataaaggtatattttcttaccctgattgagtacctatttattgaaccaaatgtcaattatacttcaagggaaaaaacaaactatgcagtcattaaaaataagcgcaaaataagcattttatcatcactattaacacagtatcagaagttccttccaacaaaaagcaacataaaaatgaaggagagacacaaatacaataaaggcagatgttatatatactttttaaaaaatataacaccattgtaaacttataaaacccaaaggaatcactgaagtcattacgataaattttttttttttttttttgaaacggagtttcgcttttgttggccaggctggagtgcaatgatacaatcttggctcaccgcaacccccgccacccgggttcaagcaattctcctgcctcagcctcccgaacagctgggattacaggcacccaccaccacgcccagctaattttgtatttttagtagagatagggtttctccatgttggtcaggctggtctcaaactcccgacctcagataatcctcctacctcggcctcccaaagtgctgggatgacaggcgtgagccaccgcgcccggccgttacgataaatttaaagtgaccacagtcatgatcagtacagaaaaacttatagtattcctggtcctcaagcttgagtgcacatgaaattcattgtgcagctttttaaatgttgatgtccacacctcccccaagacaaattgtctcagagtctctgagggtgagaccagggattagaattttataaagcttctgaggtgattttaatgtgtagccaagtagagatgcccactactatatacttaattacctaaatatctttaaaaatacaaagtaaaaaagtattactattaaccgttcataatattcacaaatgggtagagaaagactgccataaggaacaaatgttcaaaagaagaaacctgagaaaagacatagctcctgtacaaatgtctctagtccactgcagtttaggcaaaaaggtgggcagttaataccagaaccagtggagggggacaagacccatggccacaacagaacaatggtagcaatagataattattctctttccaagtgttactgaggtaggaggcatgtgtgaggatttcatagaggccgaggtactctaggattacctgcatacctgtatgaggtcatatgtaagataaatttctagaaatgctgtattaattgctgagtcagatggtatgtgcctctaaaagtgaaagattaattttaaaagactttaaaggtgaaagagaaaaagcatgacgtgtagaataaacatcatacttcataggtagaagcagagtggcagaaatgaggtaagctggagttagtcaagatggctcagtgtcaccaggtagtaggtacagagactgacatataagaaaactctcagtgattccagttcgcctttgaccttcccattaaccttcccccactgcaacctccagtcatatgcaatgtccccatcctaccagttatctaactccacaggcattgctagggcccacctgttccctctatcctgaccataatattcttctttcaggtcacctctcacctgaaccactgtaactctttttgttaatctcccaatctttctttttttttttttttttagatggagtcttgttctgtcgcccaggctggagtgcagtggtgcgatctcggctcactgcaagctccgccccccaggttcacgccattctcctgcctcagcctcccgagtagttgggactacaggcgcgcgccactgcgcccagctaattttttgtatttttagtagagacagggtttcaccgtgttagccaggatggtctcgatctcctgacgtcgtgatctgcctgcctcggcctcccaaagtgctaggattacaggcgtgagccaccgtgcccggccttttttttttttttttttttttttttaagatggaatctcactctgttgtccagactggagtgccgtctcggctcactgcaacctccgcctcccgggttcaagtaattctcgcacctcagcctcccaagtagctgggattacaggcgcctgccaccatgcctgataattttttttggatttttagtacagatggggtttcaccatattggccaggctggtcttgaactcctgacctcaagagatccacctgccttggcctcccagagtgctgggattacaggcgtgagccaccggcacctggcctaaccctcccaatttattaccatccaaagctttcctagacattagtttaatattttatgtcttttttttagtgtaaatatctaatctgccatttatattcctaaagtggctataaattaccttctagatcaaagagctatgtttgacaatgatttttaagccccgctgtttagcaggcttttaacatacagtttaagatacttcctccacaacattttccctgttaatcattttcaatccaatcacatgatctccaaatctacttaatcctcctaacgtaagcattcttcattcattcacccaacaaatacttactgagcatctattgtccagcactggtttagatcctggggataaagttcttgccctcaatgaggatttcaggcagggaaggtactgggtgtgaagggaaggcagggagacagccaatcaaatttatctacagtggctggatggtgataaatgctatagaaaaaatagagaaggatagagtgattccagggtatggtaaggtatcattttcaattgagggtaccatacaaggcatctttgaaagtttaactttggagcagaaacctgaagaaggagggcagtagccatttggctatctgggagaagatgattccaggcagagggaacaagaacaatggctccaaagcaggaatatttctgggcagactgaagcatggccagcagaccagtgtgatgaagcagtcagtatgagagtgagcactaggagatgtgtacgtaagaaacttgtcttatgacatttttggtttagaggattgatatataaagccactaaacagttttactcaattttaagactcaaagttaaataatgatcaaggtagactacccaagattacgcctgcagcaatccattactgaagcatagggaaggtgcccaccacaagacagaaagttccagaagttacatttgtgggaaaattcccacgggctggtggtccccaggcttgtgaaggaggagagagagatgttgccatggagttgcctaaagaagttgtacagaacttccagcatcacacatcatcaatgactctgcctccatttctttctctccttctaaaaatttctattcagcttactggacaaagtttcttaataatggaaaataatgtaaaagacatgctttatttaaacagcttactaaggcatatctatttcatcaaatgaaggctctatttacaatgattgtttgctagtgtgctttgctttccgtattaagtttagcattaaaaaaagttttcccaatttaaattttaatatgttttgtaactgctttttaatagtctactgtgaatatatgtccatcattaaatacactagatcattttttaaaaggtttcctattccacagatcccagagataagtgtagtgtcacatatattgtaacctgagaatatggcttgaataattggtattcaaattagttttctagtttttcaagtcaatcaagtgtatgttctgcactcaaactaaaagctgacactttgactcaccctgcacatcatagagagacacaacacaggatactcttatgatctcaatggtcaacctataacagattcctatcagatgatcaaagaaatcatcgaagttgtagattcaatgcagatttttagattaatccaaaaaagaatcatttgatcaaagacttcagcaataaaaaacaagggaggagaaaataatgtttaatagcaatgcgaagactaaatataaagacttctgcattacaaagttgtggtaattaatgtagcaagaaacttgtgaaaactcagaagcatgctatttacccaagaaacatactttttccttacttcattgtttttttccagtttccctcttcactttatgcagtcccacaagcatctctaaaaggtcacatgttgcttctgcagttgcatttcagtcctataaaagaagcagcacatcatcactttatgagaaaacattttaggaggctgagttatccaatctcatcagtctcccttcctaattcattcgcactagaactatacataaacagaaaaaccagtgagacaaaggtgaaaaagaggttatcaaaatacaaactagcaatttgaaactattaaaattcctagtagaaataaagcaaactcaatggtctctgataacagatcagaacaaaatctgtaattttaacgctctttccaccaatgagtttccatgtctctctcccagctaagtttgagacagcttggcagaaataatactaacagatgtgttgctttgtaacttcaaggatgtgctattttctgatgttcttccattcgggttttcctggtgtggattctagaggcacaaaaatggctcagactgtgagttccaggccaaggaactgttttcatctctgtctctgaccattattacccctatttcatcatggcactttcggtaaatgaatgagacagtaactatgttttcaacagacaaccagagatgcttcatgggatcttaaaattacttgggaaacagctgtaaaaccactacttttgagttcttatttctttcttgaagaattatctttgattgagatgcccattagcagtaaaatggtcccaaagcgagtataccagaaggtctcagaacttccaacagacgtgtaggcattgtacactagactctagtgtatcatgactagagcatcatgactacgagcatccatgaatgtacacattttttttgcccctcaaaaaaaaaaaaatccctcacccaagtggcttaacttcttaacaccagcatcttatgtctttaacatacacatatctagctttacactgcatcagggattgttctaagatctttaaatacattaatccaatccttacaatgatgctatgaggttgattctatattctaatcacccagataaggaaacttgttaggtaaattacctaaagaaaagcattatgttaaggccgggtacggtggctcacgcctgtaatcccagcactttgggaggccgagacgggcggatcacgaagtcaagagtttgatacagcctgaccaacatggtgaaaccccgtctctactaaaaatggccgggcatggtggtgtgcgcctgtaatcccagctactcagggggctgaggcagaagacttgaacccaggaagcagcagttgcagtgagccgagatcgcaccactgcactccagcctgggcaacagagcgaaactccgtccaaaaaaaaaaaaaaaaaaaggccgggcacggtggctcacacctgtaatcccagcactttgggaggccgaggtgggcaaatcacgaggtcaggagagcgagaccatcctggctaacacggtgaaaccctgtctctactaaaaatacaaaaaaattagctgtgtgtggtggcaggcacctgtagtcccagctactcgggaggctgaggcaggagaatagcgtgaacccgggaggtggagcttacagtgagccaagatcacaccactgtactccagcctggttgacagagtgagactccgtctcagaaaaaaaaaaaaaaagtattatgcactatgctgctgttcatagtcaggggtacctgggcaaatataactgtgcagtaagctacagtctcatccatctatttcactttttctgcttctgtcctggtatgcctaaagtagctcaatgtctactgaattagctcttgaaaatttctccttattaataatttactgagaaacaacttctaattctccctaccttaaacctcatctttgcttattttttgaaaattatcctttgggaggctgagaaaaaggattgcttgaggccaggagttcaagaccaacctgggcaccagggtgagaccacagtctctacaaaagtatttttgttttttgtttttgagagagagtctcactctgtccccaggctggagtgcagcggcactatctcggctcactgcaacctccgcctcccaagtccaagcatttctcctgcctcagcctcctgagtagctgggactacaggcacgcgccaccacacccagctaatttttgtatttttagtagagacggggtttcaccatgttggccagatggtctcgatctcttgacctcgtgatccacccacctcagcctcccaaagtgctgggattacaggcgtgagccaccatgcccagcctacaaaagttttttttagaaaaatagccagcatgatagatattttcctatgcttgccagatcccttctaactttaaaattgcaacacccttactcaaccaaggcattagagttcagttgattggttgattcagatgatgccaaaagctatgggttcaatccactataaaccagttagctttgtttgcttcacatctacagatttttagtctggatggcatattttggatcataagaggaagcaggtaggagtgtggaagacaacatttgctggagaaaaaagtctccaaaaacagcactgactgtgggccagaagcaacagcctcattcataaaaaaaaagcttcataataattggcaaaacacttctagctttctgagtaagacgctcttctcagatcatttgccagaatatagcctcaagctcctccttcgaaaaacaaaacagatgagatacaaataaaaaattaatgtttttcgtttttgcacaggctctgcttgactgatctgaatacaattttcttattcctgacaccaaggtcactgacaataaaaaaaaaattgaaatgattttagaaagtattacaaaaatctctaggagtgtagcttacaaaatcaccagaaaaacttgactgcaattccataagtatgtcttagattcttttacaattcctttaaattttcataaaaccaaaaaattattccatctccaaatagttattttaaacaagctttttcaaattaaatgaaggaaacaatatcagaccaatgtggtctgataaattttaaaacaacccagacccactcaaggtagaagctttaccagtttcaacaaataaaaatgaaaaagtaaaactatattctttaattgttagtttagggagaaacctccttgggatcatctgttttcatgttttcctgtccagagctggaaagaacttcccaatgtacaaagcacatgggttccaacagtcacaaggtaactatgacagcaaagccacagttatctgtgagatcacagaaattatatgatgtaattttaaaaattgaaaattcatataacattaaccatttttaaatgtacaattcagtggcatttagcacattcacagtatcatgcaaccatcacatttaccattaccttacattactgatgaaatattttcatcaccccaaaatgaaccttgtactcattaagcagtcacttctattcctcctcctcctcctcctccaactcctgacaaccactaatatgctttatgtctccataaaattacctcttgtggatattccctaaaaatgcaatcaaacaatatgtgaccttttcggttggctttctttcactctgcataatgtttcaaagttcatctacattgcagcatgcatcagtacttcattccaatttatggctgaaaaatattccactgtatatagatgcacatcttgctcatccattcattcattgatagacatttgggttgtttccatcttttggctattgtgaatagtgttgccatgaacatgagtgtacaagtatttgtctgatacttgttttcaattactggacatataaacaggagtggaattgctgggtcatatggtaattctatacggaactttttgaggaactactacactgtttcccacagtggcttcaacattttacattcccaccagcaaagtacaaggttctaatttctccacattctcatcaatgcttgtaattttgtttttgttttgtttttaaagtatagacatcttagtaggtgtgaaatggtatatcattgtggctttgatttgcatttccttaatgaccaatgacccaggaaatcttttcatatgtttcttggccatttgcatatctttacaaaatgtctattcaagtcccttgcccatattttaattgggttatcttttctgttgttcagttgttaagagtttttcgttttgttttgtttgttttttaacagatttgcagatatctcctcccattctgcaggttgcctttccacttacttgatagcatcctttgctgcaaaattttaacatttgatgccatccaatttgtctattttttctttcgttgcttgtgcttttggtgtgtttctaagaatccattaccaaatccaaggtcatgaagatttacccttatgttttcttctaagagtttatagtcttaactcttataattagttatttggtccattttgagttaattttaatatgtgtggggtccaacttcattcttttgcatgtagataaccagttgtacctgcaccatttgttaaagagattgtcctttccccagtgaatcatcttggcactgttctcaaaggtcacagatgtacaggtttatttctggactctcagttttattccactgatctatatgtctattcttatgcttatacctattttgattattgtagctttgtagtatcttttgaaattgggaagcatgaatactccaactttgtttttctttttcaagattgttttgactattcagggtcccttgcaattctatatgaattttaggatcagctttcctatttctgcaaaaataggtactggaattttggtcaagattgcactgaatctttacatcactttgagtagtattgccatctttaagtattctaatccatggatgtctttccattctatgatgtaattttaaggttattttaaaatgtccttgataaggtgatacactaacttctttagctgtctgtatcgctatggtaatttactaatatcctggagtatgtcacaaatatgaagtttatacttgccattggtaatccaaaattcatactccagagaatgaaggtaaattatgtaacgtctgttttgtttgctttgggctatggaaaaggtcagaacttaaggattttcattttcctgatttataattaagtttcattatcttcagttcccagtagaggaacagagatgcacgaagcttatttgttcactgataagagttaagttgtttaacagacttcgcagaacagtatcaggaactctttttcatgtagttcaaatccccccaaattgattatgtcacattagctacttcgccaaagattttgctcacagaagcttgagagtcagagcttaaagtatcaactgtagttggacagggtgtcggttggagaggaagggttttacaagtctttaaaaatttttggctaaagtctgtgagagaacaatcacttgatattataaaggtaacttgagctggatacaatctgttttttgctcacacatcaaaattagaactgaagataacacaataacccaggaaaaatcactgtggagttttctaagactcgcaattgcaaggaaagtatatattcccctaaaataaatactggttcatttgaaaccagtagattatgagtctgagtgaggggcagtgattgcctcagtagtgatgtttggtgtcaacttttcaaagtttcagtttgcacctcctgtcaatgtataagctacatgaaactcatagtccaaggtgatccagcaacatcagaaaggatcttaagaatcaaactgggccaggtgcggtggcttaatgcctgtaatcccagcactttgggaggccaaggcaggtggatcaactggggtcagaagtttgagaccagcctggctagcatggtgaaaccctgtctctactaaaaatacaaaaattagctgggcgtggaggcgggcacctgttaattccagctacttgggaggctgaggcaggagaatcacttgaacccaggaggcggaggttgcagtgagctcagattgtgccattgcactccagcctgggtgacaagagtgaaactccgtctcaaaaaaaaagaaaagaaataatcaaactgtttataaataccttcagtcagaaaataccatctgttgaaataaaccagcaccaaatcgcaggaaaaagaaatccaattccatatattttgcgatctataatgaaactaaaagcaataaaaatatcatctggcaggtgctcagggtcagtgctttggcagagcatgttagctaacgtaaaatttgaatttctgagtcaatgtttattttttgttttcaccaggaagtttaagttgaagagggcaagggaaaaaaaaataggcccaggcaagaaatggggcccagaaggtaaccaggtaaaaacctgatgcagtgacgcaaaagatagacaacagtccagtgatgacgagaactgggttaggatagacatagggtggactcctgctggctgagtctgatgccaagcaatcagcacagtgagcaaggctggtcagcataacatccgtaggagactcactctcatggcatgagttttgccacaaattcttccagaactggaaagcccttctaacatggcagatggagaggacttcctattctttggtcttaccactgcctgatgagggtcctatctttagggctcacacaatttcccatcttctaaaagtgtcttcaacacgctaactgaatgactgtacttctccctctccatttcttcagctctagttgcactcagttaacctgaactctgtgtgaagattcagaggacagaagaaatacaaaaaataaaaataaatttataaaaacactaaacaaacaaagattcagaggatgggttggatacagaggcagtgtccgaagaaacaggataaaggccacattctctttggttggtggtggcatagaggaaaatgaactctacaaggaatgagataggagaggagatgctgtgccctgtctgtcacagaaagaggcatcctgggcccctcaaacccagagctgagaattcctgttcttagggagtatgctcaatacctgaatgtatgatagccacttgagtctgtgggattttttttgttttccagttatcaagtatgtcccccaaccccacccttaaaagtctgtttttctttttcttttttttaaatgtagctcatgttggaaaagcagtcagggaagtactttaagagtatatcctagtactccttagcctgaagcctctgtaaaagggagcccagataaggcactttgggaaatttgctgcaaggctgctggggagaggaagcgccctgcctcactctcagtatagtcaaggctcagcgttttgaataacctctcggtctcaaaacaactgctgtgatttgatccaatgtggtagtagctctctgggtctctaattgggttccccgagctctctcaatgcttagctctttttttctttctgtaaagggagttttcagttaatttgcaggcctgccgttctgtgcccaagagctgaactcttgaggcgtccgcctgggacttggcgggctcactttagttttgttttctgttctctttgtggtggtcttagttataagcgcctggaaacatgcccttaactgcagggcaagtgcttgcttcacaagccctgctagacaggaaaaaggaggaagaaagcacactggggtttatgacatagctacaaactatcctcaatttttaaatagccaaaacctggacacatcctacatacctgtcagcataagaatagattttaaaaattgtgatattcacacaatagaatactactcagcaagaaaaaggagtatgtttctaacacacatcatggataaatctcaaaagcatggtgagcaagataagttagatataaaataaaatgtggagttctagaaaagacaaaatttctggtggtaaaaatcacaatagaaattacctttgaatggtgaagacagacaagacagcatgaggaaggaacttttctagagtggcaaaaatgttctgtatactgattgggagtggtgtttacatgagtataaacatttgacaaaaagtttaccaggcaaggtggggtgtacttgtagtcccagttgcttgggaggctgaagcaggacgactgctagagcccaggagttcaaggtcagcctggacaacatagcaagaccctatctcttacaaaagaaacaaacttattcaactatatacttttttaaaatgacacaaacatttttgtaacattttttaatggcacgaagtcagttttccatcatgttgcatctacgtggctaatattttgagaaaaaggtatatttttaaagtatttgatacactcaaatatacctctttaaacaaacataaatctcttcaaagtagtatataaatttatattgagttcaattaattcttaagactgaattacacagagaattctctcaaatttctcttgccctaccctccatgttaattttttttttctttttttttgagacagagtctcgctctgtcgcccaggttggagtgcagtggtgtgatctccgctcactgcaagctccgcctcccgggttcatgccattctcctgcctcagcctcctgagtagctgggactacaggcgcccgctaccatgcctggctaattttttgtatttttagtagagacggggtttcaccatgttagccaggatggtctcgatctcctgacctcgtgatctgcccgcctcggcctcccaaagtgctgagattacaggcgtgagccaccacgcccggccccctccatgtcaaatattttaagcatgttttaaatgcagaaagtatagtgtaggggatggaaagattaatttaagtgtggaaaaaaaactcccctgattacaagagcaatacactttcaataaaagcaaactgtaaaatacaaagaagtagagaagattatagctaggggaggctgggtgtggtggctcacgcctgggattgtacactttgggaggtcgaggtgggcagatcacttgaggccaggaattcgagactagcctggccaacatggtgaaactacatctctactaaaaatacaaaaattagctgggtgttgggggtaacacttgtagtcccagctactcgggaagctggggcaggagaactgcttgaactagggaggcagaggttgcagtgagcagagattgtgccactgtaactccagcctgggtgacagagagagaccctgtcttgaaggaaaaaaaaaaagattatagttgggggaaagctcatgtaagccaaaactatccactaccaaaagataagcactgtcaacattctgatgcacatgcacaattttaaccatactgggatcatactgcacatattggtattttttctcacttaaatataggtctgataaacatctctcatgttattgagcattctttgcatcttttattactactgaggttaaatcttttcatgtgattagcggccattcatatttctttgtggaacagcttggcaatttagaaaataatgccaatattttcctgaatatacttattgtagatatatggaaaatacagaagagtataagactatagaggaaaaaattcacataattcaaatcatagaaacaatcactgctgctaatttttacttttctctgcacagtttttttttgtttttgttttgagacggagtctccctctgtcacccaggctggagtgcagtggcatgatctgggctcactgcaagctctgcctcccgggttcatgccattctcctgcctcagcctcctgagtagctgggactacaggtgcccgccaccacgcccggctaatttttttgtatttctagtagagacagacagggtttcaccgtgctagccaggatggcctcaatctcctgacctcgtgatttgcccacctcggcctctcaaagttctgggattccagacgtgagccactgcacccagactgtttattttataacatctttgtaaataaactattgtcttcacccatgattacttccttgggatggactgccagaatttgaatcctgggtcaacgagtatgaaagttttaaaggcccatattgccaaactgcactgagtattgtacaactttgcattccacaagaagtatataagaatgtctatacttttacatccttgttagcattaaattctctttctcatatataatcctcaccccttatatactccccaccacaacccccgctccacacatacacacaaaaacacacttcactaatttgatacatgaaaaacagtatcttacaactttaaatgcattttttttttaactaacagaatgaagtagtttttcatctggttaaaccacctcaagttcctcttctgtaaatagacagctaaattccttgaatgtctgatacttttcagaagtaaccaaaaagtatttgaggacttcttgttcatcataaataatgattaacttagaatgtacttctcccctctcttaaaatgaccaatataaaagactacttattaaaagaatatatattataaaaatacaagagtaataagttcacagcagcacaggataaacaggaaagacaccatcagaatagcatgaggacttctgggccaaagggaggggaaatgccatcaggactgactgaatgacagcaatactaagacgtaaaggaaatttcaatttgaaccaagcaaaagaaggaaactctaaaactgtgaatataaccatagaaccctaggggggaacaaactcaaattcagagataagtgaagctggatgtagaagtagaagtgagcccaggactgtcaggagaataattagaggcctatggaacagctgcatcctccagtgttctcagaaaggctaaggtgtgagaacagctctctgtaataaagtggaggatcagctgtgggggaaccacccacacaggcgctgggactacagaatgaagaaacagcaccacaaatgacaatgcacacacccacccagaaggcagctgactgaatccctggacgtatatccctggtacttagcaggaccagcactcctgtactctgaatttacttctggaagaataattcccacttgtgctgagagaacccactacagttaccactcggatcacacaaagagttctcaatcctggatgcacatcagaatcatctgctgagctttttagaaataccaattgcctgggccccaccgcaatgcaactgaatcagtatttatagagggaagagggatctaggcatttgtatttaaatattctccagataatttaatgtgcccttaagtaataacaaataaaaacagcaaaggaagcagaaaataattgtagtattctctgaaagatctattaagataccatttcaaagatctatggagatactaagggagaggaacaatactaaaaagttattagtggggaataaaaaaacaaagctatgtttttctgtttttttgttttttgttttttttagtagagacggggtttcaccatgttggccaggctggtctcaaactcctgacctcaagtgatccaaccacctcggcctcccaaagcgctgggattataggcgtgagccactgcaccaggccaaaaaaatttcttaatccttcaacagaggtctgaatagcaaaaggggcataaccaaagacaaaagtagtgatttagaagatcaaactgatgaattctcccaaaccaagaaatgggaaatgagaggggaaaggaggataaatctagatgatccaatatgtctaaccctttttttttttaaaggagaggacagaggaaaagaaattaccaaagaaataataggaccaaacagatctgagttaaagagatctgagcattaggttgaaagggtctgccaagtttacatgatgtataacaatattgaaaaaaagtaaatgtaacttggtgaaatttttaaattacaaaataaagttgaaatctaggaacatgctacagttaggaagcatgctaactgtaacaaaaggaaaattgtatttgcaccagacttctcatctgcaatttcggatgctaaaacacaaatgaagcaatttctacaaagtttaaaaggaaaaataattttaagcatagactctcatatatccctaaaactgttacttaagtatgaaggcaaaataaagttatttgggtatatacaactgctccatgaagttcaccactgtgtactctgggggtaagtaggaagagactcaaaggtgtactgtagcaaattaaatttgaatccaagaaataaaagatgacttgggatacaagaagcagtgctgaacaaagaaataggtttaaagctctactccacaattatcgataaaatacacattaggtgaagtgcaattgctaataagaattattgaaagaaaaaagatataatgtagaaaattaatgaaaaactttgaaaaatagctgggagtaggaaagagtagcagacataaaatctttcttacttgcggaagaaccatagatggtaattaaattttgatgcttacagagaaagttaggttcaaataaaaggatgacttcctccaggaactggaaggatggtggtgaatggaggcgagcacaacatgaggttaattagtccacagccatgtcacatatcaccttgcaaacagtgatgggtgtttaaacattttatcctaagtgcaatgggaagccatttaaaagttttaagcaggggagtaacataattgacttatgtttccaaaaagatcactttggctgaaatgtagagtggatgggagtgagtagcagctgagagagaaggcagaaggctattgcagaagtcctgggctatgatgacagtggcccacattagggtgctggcagggaagatggattccctatgtgttacaggtagaatcggtagtccttcttgtggattgggcatgagggacagagttgttaggatgactcccaggttcctgactttaacaactaagtccatgaagatgtcatttaccccaagatgaagaagaccagaaaataaatatatcagcaagctgtcaaaaaaatattaagtaccctttcagtgcttgagctcgagactaatttttcatttaaattctagatcctgtggtatgctgcaaatgccaaaggcaatcacttaacttctcatcttctctaccaagtaacaatcttcctcaaccacatatttttatgcgtatttaacactggagaagtaatgtcttagaggtccattagacacaattcatctttttttttttttttttttgcgaagtctagctttgtcaccaggctggagaacagcggcgctatcttggctcactgcaacattcgcctccagggttcaagcgactctcctgcctcagcctcctgagtagttgggattacaggcatgccccattacacctggctaattttttgtaattttagtagagacagggtttcaccatgttgggcgggctgttctcgaactcctgaccttgtgatctatccatctcggcctcccaaagtgctgggattacaggcgtaagccaccgcacccagcccacgattcatctttcgatgcctctaatgaagtccacctttaaatggtggccaaatatcaagtctaaaacccaggtacgttgcatgaaattgaactgggcaaacaaggaatctaataaaatacatgacatctcatgtctgtttctaacatttcctaaagataattattttgatcagctagagactggtacacgtaataacactaaaaattcactgcataaccaaaggctttcacaactctttattgttttatttatttattcattttttggagacagggtcttgctctgtcgcccaggctggagtgcagtggcatgatcttggctcactgcaacctccgtctcctgggttcaagccattcttatgcctcagcctcccaagtagctgacattacaggcataccccaccatgcccagctaattttgtatttttagtagaaacagggtttttgttatgttgcccaggctggtcttgaactcctgagctcaggtgatacactcgccttggccttccaaagtactagtattacaggtgtgagccaccatgcccggcctcaaaactctttagacatcgccatcagggtgcatgtgtgtgtgcattcacatgccagtgattttctataccctggaaatgagagccctctcctccacatctgtccagctgtggtagagcttcccaaagtccataatgcagggtttcagctctccactaactatgcagttgaatgacttcctataaaaacaaggtcacacaccactaagggcaaaagcaaatgcatctcctggggagacagtcactgaacattaacatcacttttatcgggccaggtgtggtagctcacgcctgtaatcccagcactttagaaggctgaggcgggcagatcacgaggtcaggagatcgagaccatcctggctaacacagtgaaaccctgtctctactaaaaatacaaaaaattagccaggcatggtggcatgcgcctgtatcccagctactcaggaggctgaggcagtagaatgatgtgaacctgggaggcggagcttgcagtgagccgagatcgcaccactgcactccagcctgggcgacagaacgagtctccatctaaaaaaaaaaaaaatcacttttatctatggtcactgtgagtcaaagacaaacatgaggatcacactctccagtctccaacctagactgtccagaacccagctcctcttaggaacagtaatggataattactttcaaaaggtcttgagtggagagaagatgaggagagaagagaaaacctttttactctctgtacttctgtatcttttggagggtacaagtattaatatatatgcattgtgtattatttatgtaattttaaaaaagaaaaaaggaaaggctattaaacaaaaatgtctttttctcaaacctttgtgatagaatgagttagcgtccccagagtaatgagaaaattgcacttgcttcataatgtttcaattaccaaataaggaacgcctattacctaattacttaagaaggaatacagctgtttaccaaataaatgcatttataaacatttgggtacttacaaggtgccaagcagcatgctatcctagactctctcctcttctcaggccactcactttccttgctgatcttctattctccaattgcttcaagtcccatcttacatgccaactatccccaaagccagctttctctcaccacagagcaagctgcccattaggtatctcctcttggatggcccactacctcctaggttcaacatgtcccaaaccagaatcatcatctcccttaggcctgacccactccctatgttgcccatctcagtgtatacccaagtgcccaacccctcacctttcaccagtatccaacaatggccagttctccacttcctaaatcttcaatctgtctgttggtccctacagttacatattttctcaaaggactagcctttctcatcaagaccccagccttgaagctctctgcaatcattttccttactgttccaggtttaatctttctcactaaaaatctgattgattgctctcatcctggaaagttttcgggagcccttcatcaaaccctcagcatcaaatctagggatgttatgatctggatctaagcctttatcacctctccagcctcatcctccaccaaactaaccacccctctctcctaagctccatcctaccccctacacagcatgctctcactagctatgcttcattactttagggtcctagatacaagcattcacttgcctcatagtttttccccttactatctggtacacctttcttcctccatatacttcctctcccatcccttgacttcgtacactcttactggtccttcaggtttcagcgtaaacacttctttctctaagaagctttctctaactacccttgcatctccccactgcaaatactgggtcgatgatccttctgcttgccattctgttttatccctctcatggaacctaacatgctaaactataatttctttttattcctctatatcctcactaaactgtaaattacttgaggtgaagggttctgtctgccactcttctccatggaaggcatttacatcaatattggtatatgaatgccaacttacagaataagcatctctggacaaatcatttacttactgaagccatttcaatagaaccctgaacttttttaaggctaaatattcagattccagaggaaataatactaatgttggtgttaggaagcccatcttctaaatgttgctgctatcacctgtgtggccttcgacatgtcagttaacttgtttgagcctctgtttccctgtttataaaatgagggagctgaactagttcattaaaatctcttttgtttataaaattctgtaatagtaaatgcagcaaggcatcattgtcaaattattttcaagagaagtccagtttaatttactgtatcaataaactgataccatttatcaaaataaagtaatcaaaactgggtagaagaagggagaaaacagtgtagcagttagaagcatgaattatagggtcaaaacttcccaggttcttgttttagccgtgctgttcactagctggtgttatcttggctgtgctacttaataactagtgttatcacagagttactcaactttcatagcatcagtttcttcatttgtaaaagagaaatagcaatagtgcctttcacacagaactattaaggattaaatgagatgatacatacaaaaggtttagcatagtatgcctagtacagagtaaatgatcaataaatgctattatcattttaaactatcagcgaagagttcttatattgacaaggatgagaaacattataatagcatcagagtagtagtcactgttgagaatgcactttcttgaatacttgtaaagtctcttttcaattaaaaatgcaaaaaattataaagacaaatagaaagcacgcttactcattcccattacccaaaattagccacttattattgaaaacattaaaaatactttcagaaagatggctactgtcaagtttatgaattgtatcattgctgcctgactcctaatccttccttctgcattcattttttgtacttcctaaggggttttttagcaatggtcagtgaatgataaacttcagtctttgaaaaaagccatttcactcacactcttgaattatagttaacttgagatctactgatagtttaacttgatatcacactcttgcatggcagtttattctcagttgacagttttttcctcaaagcactttgttccatcgtctttcagccttgattgctgctgtcgaaaagtcttctgtaagtcatacttattatagtcaagattccttgtaattcttatatgagaactcttggaatgttgctactctttccttctctctattcttttcttatctctgctcaaaaccctccaatggcttcccatttcagagtacaaacaaaaatcctttccatgggctaaaagccctgcatgatctatcttccccactcccattactctataacctcatctcttctcttctccccttgattactccacatctctggtaatcacagagttttgctctgtgtccccacccaaatctcctctcaaattgtaattcccacatgtcaaaggagggacctggtgggaggtgattggatatgggggtggtttctccatgctgttctcatgatagtgagggagttctctcacgatacctgattatttaaaagtggcagtttcccctgagctctctctctctcctgccaccttgtgaagatagtgcctggcttccccttccaccatgactgtaagttgaggcctcatcagtcatgtggaactgtgaattaaactgcttttgttaataaattacccagtctcaggtagtatctttatagcagtataagaatagactaatacacgtgaactctgtgctattcctcaaacatgctgctgacttgaggcctttgacttactattcattctgatttgaataacaggaatcaatcatttatcccaggaatccacacctgttccctttatcttcctcagaactctgcttaaatattactgtttagagaggcctcccctgactacaccaccccaagtagcagtcagactcccattctatcattctctattcccttattctgctctattttttctttacagcatgtattaccatttgacacattatatttatttataatatgtcttaccttctgtgttaggcaggctctaagatggcccctaatgatctctgcgtcctggtattcatgcttttgtgaaacctcatctccttgagtgtaggccagacttactgactcatttctaacaaatacagcagatatgatgaaatgtcacttccaagattaagtcatataaagaccatgacttccatcctgggttctgtttcttactttctcttggatcatgccccgaggggaagccaatacaccaagtcatgaggcatccctatagatgggtacttatggtgagagactgaggcctagcaacaaccatgtgagtaagcttggtagtggggccatccctgtcctgaatcaatcctttagatgagactgcaactccaacctacagcatgactgcaatctcatgagagactgtgagccagaggtacccattaagccctgctcagattctcaacccatttctgttacataacaggtatttgttgttttaagatgctactttgagtcatttattatgtagcaatagataatatactctcatgtgtaaaatataaaatatcatgggatgtattaagaaagacaccactctatatgcactgtgatgatataaccagccctttaaaatcaaatttggagtaaagcaaggacttcattttattatttatttatttttgagacagggtctcaccctactgcccaggctgaagtgtagtagcacaatctcagctcactgcaacctccaccttctgggctcaagcgatcctccccactttagccttccaggactataggcacatgccaccacacctggctaatttttgtattttttgcacagatagggttttgccatgttgcccaggctggtcttgaactcatggcctcaagcaatccacccaccttggcatcccaaagtggtggaattacaggtgtgagccaccgttcccagcctttgactttagagccactcattcatgaatttgaaatctccatggtggtagtgactttttgctgaatactaccatcccttttgcctagaaaagttacaggcacacagtagtcacttaataaatatctgctaaatgaatacatggttaaaaattatattctataatgtttattacaaatttagaaaatgaaaagatcttgagatgtttccctaggcaatgccaaaatttacttgaagggcaacacactggtggtgcacaggcagaaaccagcctgcagaagacaaatcttagctagccagaatgatattttgaaaaaaattttatgacaaatagggcccaaaagtttgccatatatgtaactaccactcttgtcttataactaacaaattcctacctttatattatatgtctatgacccctggtctatagttagtcattctccatcactagaggtgttggaaaatagctgcaggcattttcatactataagggtgggtatcctaaattatctctaaagtgactttgaatttcaggactctataatttcattcatttaattgtatgtgttttgcaattatttaatacttagatgttacattgaatagacatatatttagaaactttttagaagaatcagccagttttagacatgctaattaatggaatctaacaaatagttttttctttttttgagacagggtctcactgtcactcagtccggaatgcagtggcgcaatcatggcttccacggcaacctcaacctcttgggcccaagtgatactcccacctcagcctctcaaatagctgggactataggcattcatgtcatgtccagttaatttttttttatttttttgtagagacagggagacagggtctcactttgttgcccaggctggtctcaactcctgggctcaagcaatccccctgcctcagcctcccaaagtgctgggattacaggcatgagccacagcactcagcacaaatattcttgaatatataaccattttcaataattaccaggtcattggtaaataactttgtcaggtgtgttgtttaatgtaactatgcctcccatttctagttcatgaatgagtggttccaaagtcacagtcaaacagagaaaaataacggtgctccttgttttactccaaatttgaatttaaagtgctagttacattattgcactggttacagagtagtgtctccctcagtacatctcattttattcataacgaaggcatctgtcttccttttaggtaacatgccaaggatgcaatcttattgtactaataaaacgtttggctatgtctaccaaacatttgaaaatttgtccatttcctttcagcagctttaacaatgttatttaagactgtcacttttttttttttaacataatccaaggtgccaatgaaagctctctggcccctagattacaaatgccaccgagaaatgatcctgtcttacttggttcatggccatattccaagtgcctagcggaagcctgacaaatagtaggtggtcaataaaagattgctgaaaacatggaaataactaatttgaattatgtaagtatgcacttctatcctagttgtagtttcaacaaaaagaaacctagaaactaaaaactaataataacgccaaacattggggcaacattaaaataagaggctttcaagataaccaatttgaaaggaaagcattcatgtttgacaaagttccattatggttgttagaaaatctgcttagtctgtagtcactactatgaattttattaaaagtcactagaactccacagtcttcctttaaaaagactagctctaaagagaagtaaaagatgagtaacagtttgtgttattgaatgctgattatgtgccaggtactatgcttgaaacctcacacatttcttactatttatttatttattttgccagtacaacagaatagattttatttctcttagagacagggtctcactctgttgctcaggctggagtacagtggctattcacaggcacaatcccactactgatctgcatgagagttttgaccttctttgtttctgacctagacaggttcactcctccttaggcaacctgggggttccctgctcccaggaggtcaccatattgatgccaaactcagtgtggacacccgactggcatagcgtactacagccctaactcctgggctaaagcgatcctcccaccccagcctcccaagtagctgggacaataggcacatgttactgcatctggtcacttgtttcatttaatcctcacaaacattgtatgaagcagaatctgagttatctctgtgtctgatgagaaaacagatgcagagaggtgaagggacctgccttaggtcatacagctactagtatgcagtaggaaggcaggtatttcaacccaagctactgatcttaaccatttggctacgatggcagagccagtttcttaaatcataaaatctccaggacagcttcaaggtctaaatgatcatgtggaaaagtggctacagggactcagttaattagttaccatctcctctcccactttcttcatctgggggcctcccaacctggctccttaggcaatgctaacttgtagtttgggacaataaacagtgacccaataatttgcttcctccctgcctacaactttggggagctttaggatattttaagcaatatgtggtattgtttgatgaagcccactgaaagggaagtaaatatgttgctcaattacaaagtaattggggaagttaaatacattgcctcaggtcatacagctagtaagtgatggagctgagatttgaatccagacatttttccccacacggagctgagatgtgaactcagactttttcccccatgcagtgttctttccacaaccgaaagagaagctgcataaattcaaggtcagtaatccatatagaaagagaagatcagagaacagaagtcacaacaaatcttaaaaatatgtggaagtagatgagaaatgctgccagagaaaggcaaattcaaaatgacacaaatgttgcagaattaggattacggcagcatctctaagaagatgctaacaccatgttagtacaggattggaaagggtggctgcatcaactttttaaatctcttctaacgaagacgcagtaattatgatagaaatgactacactcttctttgttaataattcagcaagcacagagcataagtaccatatgaaagctgtggttacataaataaaagattgatggacaagaatatatatatactatatattttgtgggtttggaatatatgtgtgtatacgtatacacacatacatgtatgacacacgtgtttgtgtatgcatatgtatacacacacagatataagtttatatatgtatatattcaaaacctacaaaagtttttgtatgggccatcaattaaaagtaaagcatgaatctaaaaaaaatgcatttttgagcaatcagggaaatttaaatatagactgagtattagatgatattaaagaactattgttatttaggggtaagttaatggcactctagttgtttttaagttctatcattcaagcctggcaaggtggcgtgcacctgtaatcccagctatttaggaggctgaggctggagaaccgcttgagccaggagagttcaacaccagcctggggaacacagcaagacctcatctttaaaaaaaaaaaaaaaaaaaaaaaagagttctataattcaattactattaatacatccaagtcatttcattttcaatctggattgaatattggcattattgcttattttttatgaaaatagagcagctgaattgtcagtgtcaaagctttggggttttttgctgttgtctttatcctccgattgggacttttgaatttaatgtctagttacaggattcaacttttgtgacacattaggaagacactgtctctaatatttaggaaccagaattatctgaacatattaatcaacagtatacagaactgtcctgtcccactgaccaggtcacaatgagctctacaaaataaacaagtgcaaatgctttgttgtctaaacttctttactttctaaccaatgcttaatagtaatttttttttgaaatgaccaaaaaagtatgggtcacagtgctgtttgccatgtacaaagggcaagagaaaagcacctctcccctaagctaaaagattaaaaacttggagaaaagggagttcaggtgatcacgaactctctactctgtgtttctacagaactcacttgctcatctacgattcaaaagctgccctttgcatgagtacctttcagtttaggaatgtaatttcaacagtgcatccattttatccaaattccaatagagtaagaaaaaaattggatgctccataacatttcttataaaagaattttatcagtaacactgtactttctagccaatgcttaaaaaactgttgactgtctcttttctgtaactttctggtatgtgagagtatctcagattaataactcaaaaaaacagtatacacaaccactttatcagatgtccagatgacaagaaacttgaaaagatactaagtatgttgggtaacagcttgtctggctagaataaaaggtccaattgaacatacacagaggtgtgccaccatttggaagctggcaagacagccctgctgttgttttcttcatctacctagtgagatgggagacgcacgtttgattatagggtgtcaaataccggcatcagatagtatctgctgggggctctgatgggtacagcacagctacccaaataccaaaggatttgctttcatgaacaactttccccaagaactgtgccctgctactcaaaagatgatcagggagacccacaacatcagcacaagcttagagaaaacttgttacaaaggcagaagctctgcctcacccagactttctgaatcagaatctgcattttaaccaaattcccaggtaatttgtatgcacatcacagtttgaaaagcatggatttagaggattattgtcagtttggaaggaggtttccacaaaactcttccttgggcccctcctgttcctcatttttactgatgagtcacataaggatattgaagaaccctcatcaaatcccaagtaacactaaactagaaggaaacaattgcaaaagcacctcttggaagagaccaggcttgacagctgatcacgtaaaagaatataaacaaccagagatttgctaaagaaaaaaaaaagtaaggcacacttgagtatactgctacaaatcagaccacttctagagaactagctataagtctggtcacacattctaagtgactgacagtgaactgtggtcacacagtttggtgagaaacaaggagggaaagggatctggaaattctatcgaaaagaatggctgaactgaaggatcttaaacctgaagaagaggtgacaatgtggggacatcatggtcatattcacacatctgaaagattgtctcaagacatttcattctacaaatgtgtttttgagcatctgctatgtgccaggcaccatgccaggagctaaggatacagagagtgaaaaccagaacagatctctaattttctgatgtttcttgcctaatggaagaaacctgcctgtttttccagaaagcacaactccagacaatcaaaggcaagtggaaggacatgggcaccattcaaggaagccccttctggccagaaggctacagctttgtaaagaagtgaatagacaaaagttccgaggctccccagggctggaaagaatgagttaagaaaggatgaccacctcccagggagtagtagctcaggggactaacaggccaatgctaatattccagggctagaggatgcttggggtcaatgacattaatccaagatttgtttagaattatgctacattcaatttagctgacaacaaaatttttaaaacttaacaatttagaattaacagctaaattttgtatgtaaatgatgtcataccttaaacttatgagtaaatgatgtctaagttctcatttagtaatagtttgttgttgttgctgttttgagatggagtcccactctgtctcccaggctgaagtacagcgatatgatctcggctaactgcaacccctgcctcctgagttcaagtgattctcctgcctcagcctcccgagtagctgggattacaggcacccccccaccacacctgggtaatttttgtatttttagtagagatggagtttcaacatgttggccaggctagtctcgaactcctgacctcaagtgatccatccacctcagcctcccaaagtgctgggattacaggcatgagccactgtgcccagccttagcaatagtttttaaaacctaagatttaataaaaatccacattatttattgattgattttttgagatggagtcttgctctgttgcctaggctggagtgcagtgacacaatctctgctcactgtaatctctgcctcctgggttcaggcgatcctcccacctcagccagaccatacgcatgtgccatcacacctggctaatttttatattttttggtagagataggttttcaacatgttggccagactggtcttgaactcctgacctcaagtgatccatgcgcctcggcctcccaaagcgctgggattatacataggcatgagcccctgcgcccagcccacattaatattttaagtaaaaactctgtattaatgacttatttcaattgtactcttctctcagctatccctcaaactactatatttccagttccttgatgtagcttcagagttgctcattccactcccaaaattatcctaaagaaataattccatttcttcttccagaagaacaaaagagggaggggtggggaaactagttgcctgagatgcaaataaacaatatttataaagaaaaataatacataaaacacttcagtagaatgcaatccttttcatagaatgcagcaaggcataaaaaattaaaaatatataataagacaatatttaaggtaaactgagaaactatcatatataattatgcaggttacatagcaacatggaaaaatgcttacaatgacatgggaacaatacaaacttgtataattctagccatataaaattatgcatgcatgtgatcaaaaagtaggaaaaaagaaaatccaagaattttctagagtattagaattccctttttaaaaaatttaaactttctatttcactgttggctgtacaatacttttataataaatttatcaggagccagccaggcgcggtggctcacgcctgtaatcccagcactttggggaggtcgaggcgggagatcgagaccatcctggctaacatggtgaaaccccatctctactaaaaatacaaaaaagttagccaggcgtggtagcgggcacctgtagtcccagctactcaggaggctgaggcaggagaatggcctgaacccgggaggcggagcttgcagtgagccgagattgcgccactgcactccagcctgggcgacacaacgagactccgtctcaaaaaaaaaaaaaaattatcaggagccaaaataactaactcattacaagtgtaagaatttgtacattcgcaagaaatgaaatagtaaaaggtgacacacacagtttgatcttctcgttcagttggttgtcctttataatgctatttaagttcataaacaaccaaaaagtaaagataatgagattcatgttattaaaagtgcctaacatttgtggaaagcaaaaaggactttgttcagcaactgcccatgaactttgggtaaaagcaaaactaaatttctggagtctattttgcttttcaccttatttgatctcacttaacatcactcatgccaagttgagtttttttcctcttcttttcccttctcctcaagttcataaagtaaaaaaaaaaaaaaaaaaaaaaaaaaaaaaaaaaaaatacatggcagctctgttacagtcctcactgttctcccagcaatactatgtatgaaatgcggctttctggaatgggccacagagaaagtaagataagagaaatatccaaatactacctgtcaccacggggatcaccaggactgagttgacttagggccaagagatctgagctcaagttttccacatctataacatggaaataatactacttgccccaaaaggtgatgtcacaagaaagtccctagcacatggtgatgctcaagaaatgctcatctcatccttttttccccaccttctgccacacacgtgcacatgagctctgcccattctaaaactacaggggtccttaagtctactatttcccagatgcccactccaactttctctaccctgctctctgtcttggcaggctaatcattatgaatcacatcaacaggtccctatgaccttgacctctgattgggtttagccaatgctaagtcccagaaagagatcgggggaggaagggagaagcgagggagggaataaagttgagaattcattctacttgtggcgtatgcatccctcaaccaaaattcactgctcctctcaaggtagcctcttgacacttgataatgacaatctcttctggctcctgataactactttcatccattttcatccatttgtctctttggagctaggggtagtaacagctccaccatcactataaaccctggttcctgcactatcccttatggttttctctacatcctgcccatacctcttgaagtaaactctcttggaattatcctaagttgagaatgccaacttttcctgttgggactctgacagataaagttctgtctatagaattccagaatcatttatatcttgaatcaacacaaggagaatggcagttctggggtttcagattgagatgcacatgcaggcaggatctgataattctaaaatactcccaagtattgatgattcaaaactcccaaggctagcctgtgttcccccaataggcctgagttggtcccacagctgagccattctcctcagaccccagaggaataacatcagcttctaaacccttgggaccctgtgaattgacaagaagttctaggcacccccatgttttaaatcttcagtccagcctcagtcagtgagtcccagttttatctcaaactaataaaggtgtccaaattaccaatctctcagagactgggggaaggggaaacatagcagcctcgcaaacatcccatctttcctattgtgccatggtttcatgtggagttagaaaatagagcacaagaatggactctccaaaaccaaagggttgtgttagcctcggatggagtgggaaagaatatgaagtaacccccctacacacacctttctctcctttccaattcccagagcaagtgaggaaatggggacctagttacccagggtaagtaagtatgtaaggcagagccaggactgaataaaggcaactgactgccagtccaactttaatgacaacggccatattttctcccatttggtctgtgctgtccaggtgtccaaaggcgagttaaaggaaacacccctcagttgagtcctagcccaccataatgtgtcagacttttactggtttaagatgcacttacaaggtctagagtggccctagtcatcctaagactgaagaactcacagaagtttcatctatttctattgagtctaaagatatagagctaaggacagccttagctgtcagcacccgccatgtgcagagggctcttccagatgccctggtgagttaaaaagagtcatccaattctttttttttttatttatattttaagaagaccagagaagtaaatacaaagtacaagagaaaggaactgtacacagagcattacccagcaggaaggcattaaagcagcagcatagtggcacattaggagctcgttgctctgggtcacactgtgacatgtgaaacatggagcatgccccagcctttccaaacctccatttcttcatcattaaaatgaggtcaataacactatccactattaatgacactactattaacacagggttaatgatacatgtagcagtccttagcacagtgagtgacatgctatgagggctcaataaatgcttgcttttataatcagaccaaactgaagttggttaagtctcctctagctggaaatcaaattctacagccttactggcatcttacctgcaccctagggcttaaaagcctttgtttacttttagaggaagtatattacaatattaacaaatgtaacaaaacatagcagtaaaactatgctagtaagatcactgagctagaaatacttcattgaatagatgttttagaacctacattcagaggggagttccatgagagtgggtgtcagccaggagtaagtttagtaagggactgaaccattaaaatgctaacaaaacctcaggataattcattaggatcacaatatgcagactaaggaggaagtttacatctgaagaaaccagggatccagaatctgaagagagggacttgggagatgaaagtgaagaaagcttcttcaggtacttgaagggttgcatatgttatatatgatgggaaagactaaggaagtccagtgggtcaagagtcccaggacaaatattgtggcttcctatgaggaagactgttcttgtgctaaccaagaggtgtcccctacgtaagatgatgagttggcatctcaccagtgggcatactggaaaaccctgtggtcacttcctacctgaaagtctgcaatcctaatgtcttatttggacaccagaaataaacataattgggaatcaatagagtgcagctcctatgtgccagcatttctcaccctgctaacaacaaaaccttcagagaataatataacagctcaaatttagtctgctattacatttacttgggcagtcttattccatttgagaggcattctagttaaaggtaaataacaactctataatgttttttcttaaagataaattaatcagcccaacactatatcaaaaaaggcacaaggataatctgtcacatgattttgagtaattatgctaagggtttcatttaatcaaaggcatcattgcttttttgctctgctaggctcagaaaactaaacattgaaaaaaatcaagaaatattctaaaaatcacagccactgagaagaaagtgattcaacattatattttctttgttccacctgccaaaaatgatagagtgaatttggagctgagaaagacaaaaagaaaaaattcaagagtagaaaaagacatatgaaagacaagcatgaggctaggtgcggtggctcatgcctgtaatctcagcactttgggaggctgaggcaggtggatcacttgaggtcatgagttcgagaccagctttgccaacacggcgaaaccctatctctactaaaaatacaaaaattagccaggcatggtggcaggcacctgtattcccagttactcaggaggctgaggcaggagaatcgcttgaacctggaaggcagaggttgcagtaagccaaatattacaccactgcattccagcctgggcgacagaaggagaagaaggagactcggtctcaaaaaaaaaaaaaaaaaaaaaagccaagcatgagagtttagtgacattaaccacccaaaaccttcctgaaactccagatgtatgatttgtatacctaagcatatagtgcagtctccacccgcgttttctttttccttcaccacaatgagttgggtagcaggagagaaggatataaaggcagaagctcatctttcattcagtctatttgctgcctttgacggctatcacaattcagcacacaagaatgttagtgctcatcaccatggaggcaattgtaatgtcaaacccagaactgtggaatcacaaaatatgagacacatgtaacaggctttgggatgggagggtaggagtggagatccaaattaccaggcaagaaattcaaggcttcagaagcccttttgaagcaattcagattcttagtcatttttttttcctttcagaaaattgagacactgattatttctagttaaattaatctgttcatagaatatattataccagaattccagccttcagacccagtgagaaatgaatgcactattaaaggatatacaatcaagtatagataccttcattataaagtgtggctttcacctgaactggagaaagcaatctttgtcctagatcacgcagtatttcattgtaactctatccctcaagcactactagactggggagacaagtcaacagggtgctaagtgctatcacagaggtaatctactttatgctccaggagaaatggaaaaggagaagtggcacctacccagcccgaggggtcagagaaggcttttggaggaggggcacctgagacgaagctggaaaggcaagtagtgttggcctaatgggcaggatagggtttattctatgcagaggggcacaggggaagccaggaggaccaactggaaacccagaagactggggaatgctaacatttcagggctggcctaaggacttggggaccagaaaggggccacagaatgatgggtcagaaagacagacgggccagaaagacagaagggctaaggaggagggcctttcaaggcagaagtcgctcacagtgtgaaggaacgcaaaccaagtcagacaagggctaaaaggcctagacttaggtaaccacaaagggcctaaggtgccctttgcctgagacatttcagggaagtaagtggcagtgacagaggccagagtacagagggttaaattgcaggaggtgaggaagtagagaccatggataaggctactcgcaggaagcctggctaagaacagggagtgagctaacaggaaatactggatcaaattgtattttccagcctgaacctcttctttaagctccagactttcatctcctcttgaattcctccttttcccccaccgactacactcaatttatattctggcctccccactacccattctccatacaacagtctgggtggtctttttaaactataaatcaggccatcataccaccccatactcaaaatatacaatggcttctcactgaccttagaatagaatcttaatgccttgctatgccctgtaagttcttgagtgatatgggacctgctttgcgctccagtatcttctcatacacctctcctcctcttagtcttgtaccaacctggtctcctttcagtccttgaattcattaagaacagtcctgccttaggatttttgcccttcctcctttaccaggaactagtcctaggcccccaagcccttcccaagctctgtccatcgaggcaggagcctcttcattccctcctgtgtttgcacaggtcctgcctcacccttctcagagctccctccaccattttgtgcaaataaacacccacacaccccaaaatcacctcccatccagcagatgcaggcaaagggtgagttacctataaaggaacaggccaggccgggcgcggtggctcacgcctgtaatcccagcactttgggaggccgaggcgggcggatcacgaggtcaggagatcgagaccatcccggctaaaacggtgaaaccccgtctctactaaaaatacaaaaaattagccgggcgtagtggcgggcgcctgtagtcccagctacttgggaggctgaggcaggagaatggcgtgaacccgggaggcggagcttgcagtgagccgagactgcgccactgcactccagcctgggcgacggagcgagactccatctcaaaaaaaaaaaaaaaaaaaaaaaaaaaaaggaacaggccaccgcaagtgctcttccaaccccgtgcccaacggtttacctcaaatcaacttcttcagagcccaggttttccagccctcccagtgggatgtttcctgggtctcactagtaggggctttgatgtcaaaagacccaggccctagctcatttctctgctgccaattagttgtgtgccctttatcaaggcaccactgcatcaattttcttatcctaaaaaagataaacagtgtctccctagcctttaagaagctcaccacaaaggtgtactaacaccccagttctcagctccctcttccctgacccagggacctctctcccacctttgcatcacttgccttctttaccaggaacaagtcctaggccccttggcccttcccgaactctgcccatagaggcaggagcttctccattccctcctggggttgcgcaggtcctgcacctcactcttctcagagccacctcaaccattttctgcaaataaacacccacacacacccaattcaccacctatccagtagacagatgcctattctcaaccatctctcttttagccttggtcactagctcctatcctaggcctggtatacaaaagcctcccaatcatgccctctcactctcttctccaacactgctggcaggccactgacacccagggcaacctggaaaccatggtttgaagatggcagagcatcattagtctgggccccctccatccccacaggtgactggattttaaatgagcacagaaatgtctactgttttaagccactgaagtttctgcagggtttatctattacagtagctagtgtttctctacacaatacaggctgaattaaaatggcagctggagagaagggagaggactctagtggtaatgaagaaagcctggagctaggattaggcatagcctgacgaccatctccatttctgtattacttatcctcttcaagtactttaaaatatgttttctcatttgacacactttcatcaatactattgttattaacaattcacaaatgaaaaaaatggacttagtgaagttaaggtatgtccaagatcccatagctgataagtggcgaagccaaactggacacaggacccctgactcttagtctaacagcatcttccctgcagcatctaatctctcaaagccacattctagtgccacatcagacacactgaactaaggtacaagggtgctagaatgaaacaaaaaggataggtagtctagtagaactgataaaaggcagattgtggaggtcttcgtaaatatcagactgtggagtataacttttattcaaaacacaatgagaagcaaaaatcaactcccacttccaagctccacacagtaattttatattttacctgccttcaaagaccttactgcatcatctacccttggctatcagtggataccaatgctccactttacacaaaaaaatagaagcttttacaagggcaaaaattccagccccttgccttctatagacttctctgtatccccaaatagcctttcctctttccacacagtcaaatgaaacaggcactcctcctctggcaatgctactggccatctcctgtgcatgcccctccatccacagaagagaccctgttcaagcacttatcctttctcttcctgaatctctgatttttttcctttctcctggctcctcctttcctcggcctctgaacatgctagagcccctctcatcctaaaatcaccccttccttgggaagcccatagccccctcttatcctcacacttcctagctgagctcttttaagcatcagcagtgaaaatgcatctctacttcattaccatggattctctactccacccccacccaaggtaatgtggtggtgggatgctgaaacattcacctccagtgatacctcttaagagctaaatccaatggacaacttccaacatttctcttactttaccttttcatggcacttaacactgctgtactcccaccttcttgaaattatcccctgccttagtttccatggccccattctctcttgatcttccccctgtctgtctactcctacttggtttccagtatagtctcctcccctctgcctcctcactaaatgttggtatttcctggggttccatctttatacttcctcttactctacatactatactttctgtttgaaatcatccacagatataacttcaactgacagctacacactggagacttccacagtgtgtagctgtggaagtgtagctatatctccacagtccagaccactcatgtgagctctccacaatctggctacacgtgcctgccagtatttccacctggattccatgggtggaattccagctcaaactcaacatggctaaaaccacagcaagcatcttgtttaccatgcttattcctcttcttactgcatccataaggagagcatttattattgtctcagtaagggctctacagagaaatagaaccaatatgaaacaactatatatatgtgtgtgtgaatggatatctgtatgaatacacagtcatactcacacactaagatttattttaagaactggctcacgcaattgtagggctgacaagtcttaaattttgggcagaccagcaggctagaaatggaggcaagaattgctgttgcagttttgaactcccctactcgaacaagtacccaggagacaggtactctcctctatatccccagcatcttacacagacttgacacacagcagaagctcagaaagtgttggctaatggccaagtgggtataaagtgagatgttattaaatgagaatgggacaataggatgaatcatcatggggaagaatcaagacttgaccaaggactatgttacaaatcaagacatagcccttctggggcattcatttgccagaattaccgcatcactacacccatgactgaacaaggaccattacacagatagaagcatatccattcaatactatatttgaatgtctcaacaaccctgttaagttggcatggcaaagaaaaggtcacattttatgagtaaaattgaggttcaaagattaagggtcttgtctaggttgctacaaaaaatacctacaacgaaatgtcttagttgttcagtgatacgcaaggtaagagggaacattaaaacaacagaaagttggctgggagcggtggttcatgcctgtaatcccagcactttgggaagccaatgcgggtggattgcttgatcccaggtgaaaccctgcctctacaaaaaatacaaaaattagccaggcatgttggtgcacacctgtggtcccagctactcgggaggctgaggagggaggctacttgatcccaggaggtagaagctgcagtaagctaggatcacaccactgcactccagtctgggcaacagagcaaggccctgtctcaaaaaccaaccagctgggtacggtggctcacgcctgtaatctcagcactttgggaggccgggacgggcggatcacgaggccaggagatcaagaccatcctggctaacatggtgaaaccccgtctctactaaaaatacaaaaaattagccaggcgtggtggcgggcgcctgtagtcccagctactcaggaggctgaggcaggagaatagtgtgaacccgggaggcggagcttgcagtgagccgagatcgcgccactgcactccagtctgggtgacagagcgagactctgtctcaaaaaaaatataaataaataaataaataaataaaccccaaccaacgaccaaaaagtaacagctcagctcaaaactccttatcaacataaacctgcaaaaagtaatcttctactatttacaaagaatactttttattataactattgttctgatttttgtactatattgtggtatgtattgtattattagaattatatatccattgttgtaataaaaaatttctggttatatagtaaatatccagaagcactgttttctgaaataaagccaatatgtattaaatctacgactttaaagataactatatagccctaggtaccacctaagtagctggtttccttatttattaatatacattagaattagtgaaatgttaatattcagttcaagcattgtatttggggatgcgacgcattctctgaagccacagagaagtgaaaatactccattagtcattcttgttaaagaagacacggctgattactcccaactatatttgcatatatagtaacttgacctttgcaaagctcttttctacgtggtctcatccagtcttagaaaaatcttataagccagggcaaatcctttttattttacttgacagaaaatagggtcaaatgcttaaggtcatgtaattgataaaaggcaaaagtgggactagacaccaggcctttcttccccaaagcctacagtcattctataaagctctcatggctttctggccataggtccactagactgtgagtaccacagaagaccatgtctgatttgctctccattggtgtccagcatagtatctgacacatagtagtcacataataagtatgttatttggtgaattactgaaatcattttcttaagtggctttagttacctgtatggtaaaatggggcctatagcattgccaaatatcttggctttttaaatggtattgtcattatcaggaataaacaaaaaggaaatgctatcttctgtgaactatatatgttgattcccaaggggatcaaaattctgggccagggccccatttcagcacaaaaggtagcaagtagtatgtttttcagcttcctggaaaattaagagttgaatggaggggtcaagtggaagagccttaacatgggaaaggaaaaattgaatgcaagatttcaggcataacgatgaccacctacaaggctagcacaatggtccagctatagctaacctaccatggcaagaaatgggcttgccaaaggagtgtgaactcatccagagagtacacacaccagtgagagagaatccactccatggcaggaagacatagctttgaggtaggccaagcccaggaaccaagtgtgcaaaggtctagggcagaaagagccactctggacatggcttcacaggctttctgtaaaaccatctgtgcttagccacctagagcaaggcagaatgaggagcagctgacctcctttggtttactgtggccaaccccacagggatctaccgaccacattgacaaccaccccagagaaagatacccagaaatgagatggtgagtattcaaaagtcctgttaacctggcagactattcatttcctatgaaggcctcattaacatcatttagagctctattttccctccattttaaaccatatattcaaacatatacatcccattatcattctggttttctattcactaccataccactatatatcccattctttcagatctctactatgatcccaagatcattttcagctatgcttccataaaagcccttctccaccaaatattccttaatgcatcacacattaattacagaaacaaggtatccaaagcaattgagtcatttcagataactgaaggctaattcattaagcaccatgttgtagtcttgctaaaataaatgatgccttagtaaacataaaatatcaaatgtaatttactagttccaaaattttactcaaacttcaagatccagtctgaatacaaacattcccttaaagcaacctccaatctcctcttgccacctccatccaccactagaaataacctctctttcatctgtgatcctataacattttgattatatctccttcacagcacatagcatggtctgcttgaggttagagatctaaatgcacctcgactttttaaaaagttccttgaggacatggaccctcttttcaactaaggtacctagttcacagcaggaatacaaacacttcacaagatgaatacctttagtgacttaaacattataaagagcaccgtaatacagcagagcctgcaagggttcctgagctctgacgggaggaaaagtgtgacattaaagaacatattatcaccatcacactgatcggttgagtattcctcagctttagaagaaaatgtttttctaaaagggaacaacactctgaattcctttttttctctaaaatggaatcactttttacaaatctcaacttgcaaaatgaaagttctggttgaaatggcattgctaatcctccacggccacattttctaggcctcatgatgtacatttgactagctccctgtagttcactgaggagaggagacagtgactggaaggatgtggtaggtgactggaatgcaactgaggtgctgctattcaccagtttgaaagccagccttctcagtccaagaggaaataagaaatggaacacatgattgagcaaatcaagttttaggctcaaggtccatagcaaccacttcaacagtgctgacaacattcttttcccaaagctttagtgtttgggtatgataaaccaggtggtatagtgttaagtaatctaaacaatgcaactcaaattcagaacctctttaatagcaacagggggagtgtaagtggtcagccaagaatgactaactccaagttccctcgtgagcagctattcttttgcaggattcctctccttgtcatggaaagaattttcccagggaaaatagggagaatggggcagtaaggctaccagtatcataatattaaatatctaatcatatagacaaccccttggggataacaactgttcttaactttggcttgttgagtaaaactttgtttttaaatccagtatcttcagagacagaattgtgcacataattttacaaatacctaaagcactaagcatgctggtttatgacggaaagctttctaaattgcacaacttccttctcagcctttctgaacaaactaaaccctaattcgacctattcctgttgaacatgataacaattataatcagttgatgtattcagagaccaccgaggcaaacaggttatgtttttctctataataaatgtctccaaacagctatactttgaattattttatagagcatttctgtttctgtcattactagctgtcccttcctgctgttgtcagtgtgtttgcctctgatagagcattcttagttcactgtttctgatatcagatgtatcaggaaagccaaactcttaagtgtcatgggctaaggttccctcccaccagtcccaccttcttcagacccaggcaataggcttccagatgccatgttcttaatcactacagctgcatttcccaaacttgcctaattataaagaattaccaagtggggagggtgttaaaaatacacattctcagtctcctcctactaaagactgtagttcagtgggcccgggatagagcctggaatctgtttttttaacatacatcctcatatgattttcatgaacacgtttagaaacacaatactacatgcctctagtgctgccctcttgaattgggattccttcagaagtataatgaacctgggccatggccgactccttcctgagagacctggcaaccaataaaccttccaggtcactacttttccatctccctcgggtaaaatcccctgatcctttcagattcctgcagggtaaccacaacatctcattgctgggatctccaaccccaccccatttgctgaagattcggcccactttccttttctccatcctaaatatcctacaatccttctgatggcttctctgaccacacagatggctgaaacaactctccagcctctcagttacttgacctccttgaattcagccttcttcactgagttcacttcatttcagtcacttatatctgtagcaaaacacaggaatctgtcatgcccagtaattaattgctccaactctgaaatcttccactcatgcgtccctctctagccacatcctattactccatcactccacacacccattccttgacttcaacaacactggtccttttctcctccccatctagcctagatacctttagctatcacgttagtcaccccctggccaatatcccagttcctctgctccactgtctttctgccactcaccccagcaaaccccaaccctggctcaatccaactatatgccttctttgctcctaaaaccaggcagctgaatgctaccagtgccccagttaatccatggtcctatctcagtggagccctgcatactgcctggagatcatggacattgtctcaggttcattacccactcttcttgacctcaatggtatgtcaaaccttgttttcctctgacctcttcccatttattcttagcagacctcacctctatttcacagagatgataaccaccaccagacttggcacttgctcataaggcatcccaccagaaaatataactgtgcccagatattccaacatgcgagctgtcaagcccattatgcttaaactgagtctactgttcacttggttatttgaaataaactccctggtggtaagcattactgacgtaaacagtatgctggtgaatatctttctagtgcaaaaaaataaaataaaatagtatagccagcttcttgaaagatctctctaccctgagaatacttctaaagatggggaagaggtttttttttttttaaagaaagctatcttacttcacaagcatttaacaagcacaaatccaaacatacgttgtcatacatcaatagaataattataaatcccaacccagatagttaattctgattttttttttttttttttttttttttgagacagagtcttgctctgtcaccaggctggagtgcagtggcgtgatctcggctcactgcaacctccccctcccaggttcaagcaattctcctgcctcagcctcctgagtagctgggactacaggcacgtgccaccacaccaagctaattttttgtatttttagtagagacagggtttcaccatgttggccaggatggtctttatttcttaacctcgtgatccgcccgcctaggcctcccaaagtgctgggattacaggcgtgagccaccgtgcccggccaattctctgataatttttataaattcaaaactacggtcagtgaaagaacactaagttagttattgtctgtcattcactcttatccaaactctaaattgttgatgagtttacaagtcttttcttgaggatttttttttctccttataatagtaatagctaacattgatagttttttgtgtataattctgctcctcaaaagatcctatgagataagaactattatttttctccatttacagctgaaaaaacagacttagacatgtaattttcctcaaggcttacagctagaaagtggcaaaggtaaaattagaacacagagcctgaaagcaaactatctatatgctttggcatagtggttattaacagaagcttcccaggagaatataacatcctaacccaagtgttcttatttttaatgctctcatacatgcttagaaaaacaagagaaaccatcagggattaatattgcagcatatttcatattcattcattcctgcattcatatcagaaggcagtaatgaataagggggaaggttctaaagtcacatcacatagattaaaatcctaattccaccatattcttagctatgtaactttaaacattacttaaattctctaagttcaattttctcaactaaaaaaacagaagtggtaatataattaccatcatcaccatactgggttctcccgaagatttagagataatgtgtgaacacacatagcaatggacctggtacatacgaattctcgaaaaaagtagctattaaaataactattcaaaatgttctgaggccctacacctactggactctgggcagagcactgggtgctaggactgtaccatatacaggacaaggctgtccctgccctcctagatcttgtagtctctattgggggagtagacaataaagaagaaaacaaaagaaggaaacatataaatgaagtgctattgagggggtaaagccagctggacttcctgggtcgagtggggacttggagaacttctttgtcttacaggaggattgtaatatgcaccaatcagcactctgtagccaggattgtaaaacgcaccaatcggcaccctgtagctagctagaggtttgtaaaacgcaccaatcagcactctgtagctagctagaggtttgtaaaatggaccaatcagcaccctgtaaaatggaccaatcagcaggacatggacagggacaaataagggaataaaagctagccaccccagccagtagcagcaacccactcgtgttcccttccaggttgtggaagctttgttttttcgctcttcacaataaatcttgctgctactcactctttaggtccatgccatctttaagagctgtaacactcaccacaaaggtccgcagctcctttcttgaagtcagcaagaccacagacctaccagaaggaatgaactccggacacactatgaattttagtgaagtgcaagcaataaatgcacatgtgctgagatagaggacaatggggaggaagctactatagaagtggtgatcagggaaggcccctctgaggaggagatgttttagctgagactggacgtttaaggatctttctatgagacaagtggaggtcttgaagagcctgtacagaagaggagaatacggcatgtttgaggaactgaaggtgttcaatctgacaagcatggcaaacaaggaggggagcctggagagggagcacgtcagagtaagtgtggatgcgagtccaagtgcagtggaagccaccaagcaggggggtggcatgcttgggtttactctttagtaggatcactctggctgctgtgaggaaaatgtgctagaagaaagcaacagtggaagctgggagaccaaccaggagacagggaatcatccatctgagagaggtgggtaggtgaattaggaagatggaaaaaagggagggtttgagatattctagaggctaggccaaaaagccatacagatgggttgcatgtggagtgaggaaatgagaagaatcacagacaactttcaggtgtccagcctgaacaatgaatagacagtactaactaacagtgagacggaaggctgaaggggagagtaaggaagggtcaggaatgaggaatacaaatttcgaagcttgagagggagattgagagatcagttctgaacctgtgaaatttgagatcactgggacaggaaggtggtagctaaaactgcaagtctggaaccagagaaagggtggggagacgtaacagaaagagtcatctgcatccagggggttctagggtcctgggaattgatgagatcatttagagagagaatatgatgagagaagggaggtagcagagccagaaaagaaaagaaataatcaaaaatcacgttgataatttaaaactgaacatggtaacacagcccacacaaacatagaactggctcaaatacatgctcaatcaatacctgtggaacaagtaaaaataaattcttaacacatacttttaggccttttttttttttttttttttttgagatggagtctcactctgtcgcccaggctggagtgcagtggcgagatctcagctcactgcaggctccgcctcctgggttcacgccattctcctgcctcagcctcccaagtagctggaactacaggcgcccgccaacacacctggctaatttttgtatttttagtagagacggggtttcaccgtgttagccaggatggtctcgatctcctgacctcgtgatctgcccgccttggcctcccaaagtgctgggattacaggcatgagccaccacgcccagcctccttttaggcctttaagaaaataattttcatttaggattccccccttaccaccaccactaccaacttcttgtatatttggaggataagaaaaacaagtttttgaaggtctctgtttggattgtgttcaaggagatcctttttcttaaaaataagaagcaactgtttttttccaaaaagtcactaaaatgaaaagtagtctacctgaaattcaaacctttgaaaagcttacgctcacattacgacttctctgtaaaaattctaccccaagatacaattttcccatcctcataaattaaaatgcaattatacattttactacagatgtttcatcctgaaagatgaaactggtactttcaaacagttcaagagtcacaggagagatgtaaaattgcaaaaggtcaaggatttattttaaaatgttaaaaaaaaattaagtatacctgctaggccatccaaaaactgataagcagggagaggaaaaggacagaattgccagaaaaataagtaaatatgtaacagctattccccaaatgaaaacacattaaagctataattatatctctgggtatctgttgacacaaaaaccccactatgctcttgaggcttacactatcactatcaactaccaaattgaaatcacagctgtaaacataactgggaaactttatacttttcaaaaatatccagtgtgacacagggataacgcataagaaggaaagccaacaacatttgccaaaaatgttccttccctcaattgttcaagttaaatcaagaccgtaattctttttaagaccacagcctcactttgtaaaattcttctcagatatagatgagaaagaaatatcctgacctttaagagattgtcattttaactcatgacacagctacctagaagcctagaaggctaccagcaaggtcatatgaatagatggataatgagcattcattctttccttcattcattcaacaaatattaagtacccacaatgggccaggtgcagtttctgagccctgaggatatatcggtgaaaaaaaagtctcacacttcagggttaatgagggagagagacaatacaccaacaaataaatatgtattaccaagtggtggtaagcaaggcaggataagaacaacagggaaatggggtgtatttgataatgcagtcaagcaaagccagacaacctaacttttgagcagagacctgaagtaagggagtcaactatgttaatatccagggaccagagttctaggcggagggaacagcaaatgcaaaggcactgaggctggagtatgcttgacttttttgagacagagtctcgctctgtctcccaggctggagtgcggtggtgtgatcttggctcaatgcaacctccgcatcccgggttcaagcaattctcctgcctcagcctcctgagtagctgggattacaggcacgcaccaccaggcctggcttttttttttttttttttttttttttttagtagagacggggtgtcaccatgctggccgggctggtctcgaactcctgacctcgtgatccgcccgcctcggcctcccaaagtgctgtgattacaagtgtaagcttgatgtttttaagaaacagcaaagagatctgtctggcaaggctcgaagtgaggatggttgttcggaagagggttagcctggcaggccacagcaaggccttcagagtttactttaagacaaaaagctattggagggctctaagcagaggactaacatgatctgaattttttaaaggattgcaaagagaaacacaagttcctactcataaaacaaagatgtatctctcataatctagttataagtcaaagaaaaaaagcatagaataaaagttgtgtagtatgatagcatttttgtaagaaaaaacacgtatacatgggaacaaggctaaaaggcttaataccaaattgtgatttactatggtttgtgggattatggggttttttttgttttgttttgtttgcaatgcttttctttgtttttcaagttttctgccttaaacatgaattactttggtaatttttaatgttatctttaaaaagaaaaaagcactccaccatgagacttcccttgtctgaaatcttacttcaatatgaaaaaaaaaaaaacaaactcaaaaccaaaaaccaaaacaacatggggaacatttttttccaaaaattaccacacttcccatgcaatgtttgcctgtcatgaaccactgcacaaatcaagccccgctcaatgtatcaaggtcacaaaaccaacttggttaatatgttgatcattacatagtggctctgtcctctacagcaactttgataccatctttccaaggcagcaacagaagggcccttttcattcattttctatgtgtctttgatactattttgcgcttctggatttttccactgtatgtctcttagaaacaaattaagctcgaataagttgttccagctaatgaagtgcgcttttggctccttctccgtggttcagaattatccggcaaaataccaattgttttaggatgcattttctcttagttttgaaatattgcaatactaagttaccacaaataaagagcattgagataacaacacacaagaacgtgtataaatggaaactactgtaatccttttttaaattaaggacgtgtggacgcctcatgaataaacatttaggatatctggataaatatatactatgtgttcacatagataaaaacagaaaggagcattccttcctacctcactcccccaccccaagtcacataagtttctcgcagggcacaagcccagggcaatcactgctcagaaatgtaaaccatgcaactcaaaatgactcaagccctcaaacactccccacctaagtcctacatcccatccactcctcaatcacttccaacaggcttccctgaatgaaaatcccaaactgggaaggcttaacaagctccaaactccactcacacgccactcagggaatccgaggacctggggcccacgtgtagtgttttcgcgtgggcagacaagggtcccaagattcagggtgctactgtaccccgagtggttcgagtcctggctctgccgccttcactggtcgagctgacgctctttacaccgggggcatgggctgccacatcccagcagagtgcaagggccctcgggcgtggacgcaggcggctctcgggtgcacacgcggaacgcacactcgggcatgcactctcacacggtcaggcgggcctgcgcgaacgcccccgcttcccctctaccacccccttttgcgccttctacgatggtggcacgcggggctaccctgacccctaggacccctggacgcccgctcctggagcccggggggtgatgacagatggcggagggcggggctccggggggaaggggcggagcctctcagcatgggggtgctggcggctgacagaaagaccaggggcagccggcgggagggggctgactgagactgcgggccggccgcgggccaggcgtggcgggaaggagctcgcgcagacacagggtctgacaggcagagagagatacagacaccggggactgacagccgcgggggcacgcggggccggctggccgtggcgggcgctcacctggcagcggcggcggtggcggcgcccgcgaccgggccgctcttcccgcgctgcgggcctccctccccgcggccgggcgggcggccggcgcaggccccgcagaggcggcggcggcggcgacgccggagccgcggactgctgagcggcggggacgcagctgcaccaaccgactccgggccgctcggctgggctcggccgctctcggaggcgctcggctctgctcggccttgcacggctcccctcggccttgctcgactcggctgggggcgtggcccaggccccccagtccgcccaggtcgcctctggcggccgcggggcggggctttcgagcgggtgcgagccccctgacgtcgcggggagcggaccttgcccccggcgcatgcgccagcactcctcctcccccctcctccccgccccaccgtgtggaggctgaagaagacggggaaggaggcgctgggggcggatgctgcggtcccagaggttcctggcttttgtactccatatcctgctctttccagaggaccacttaaagaaggtcacaccaggttacactttcaaaaggatgtgtgtgtaggctggcaggggctctcgctcctgtctgcccccactcctccaattccagtgtttcccaacaagcgtcgactaggagtggtcttttatccaaccaagggttcactgcaatttttaatattttctgttttcttaagaataataacaaaaaaactaactcttgatcactgttttaacattgagtcttcaagtacttgaactttcaaacatcagtcagcctcctcgagtccactaataccgtcctttcttcatagctgttgtataacctgtaatgcctgggatggggttgggttctttcctgaattctcgtcacatgatccaggcacctttttagttatggaaccaagtctgcagcaaatatgctcagaaagtggctcccacctttagaatccagtgattagtaaacagcaggagctctacggtcttgacacacctggatgggaatcccagatctgcattaatctagcaggttaataattgtctgagtgactttggacgtgttaatctctcaactgtaaaagggcaatgaaacatgagtaaatcagtagaaatattaaaagggttaaatgacaccacatataaagatttctgcacagtgcttggtgttcaataagtaaggctgcctttaacttcaagtaactttagaaccttcagatcctgaaaaccagggagcatatacacaagtgtgagcgatgtgtccaagtaaacaagtcgatagtcaaacacccatacgtggcaccttagcttgctcctttcacaaccttccctacctcagttcatgtcaactccattcttctgatgactccagacaaaccattggagtcatcctggactccactctccctatcatatcccacatgcaacccattagaaaagcctgtcagctctacctttaaaataccccttttcctctttcctggaatattgtagtagcctcctgcctgttctccacgattccactgtgctctcatggtgccttctctcaacacagaagccagagggatcctgttgaaacctaagctcaaaagcccccagaaggtttcccatctcagagtaaaagccaaaaaaaaaaaaatatgggggcagtggggtggagagtgggacacagtctcactctgtctcccaggttagagtgcagtggccccatcacagctcactgcagcctcaacctcccaaactcaagcaatcctcccacctcagcctcccaggtagctaggactacaggtgcacgccaccatgcccacctatttttttcatttccaaaatgtggtttttttcccaaaggcttccaagatcctatgtgtctgcccttcgtccacttatactctccacctctctaactgcacctccttccactcggcctcctcattgcatgccaggcacactagcctccttcttgctcctggaatatggaggctcacttctacttcagaacctctgtacttggtgttgcttcctccagatatcagaaaggcgtgtgctttccaagtttctactcaaaagtcacctccccagactttcccagaccactctactaaagtatcaagtcccaactccaatcactatcctctaagcctgctttacttttctgcctagcccttctaacctgaatatcatctataatatctctgaaggtgggaactttgtttttcccatcttcaacatctagaacatgggtcgacatgttcaggtactcaataagtatttctgggatgaatgagaatgtatataggttatactgctccaatacaacttcatttattcaacaaacttttctgagcatctattttgatccaggcacagtgggatcctgagaaaaatgaggtattctcccgacctttgaggaacagtatttcagaggaaacagtcatgtaaaaaaaatacttctggccgggcacagtggctcacgcctgtaatcccagcactttgggaggcttaggtggatgaatcatctgaggtcaggagttcgagaccagcctgaccaacatggtgaaaccccatctctactcaaaatacaaaaattagccaggcatagtgaggcgcacctgtaatcccagctacttgggaggctgaggcaggagaatcacttgaacccgggaagcacaggttgcagtgagcgagtttgcagcattacactccagcctgggcaacaagagcgaaactctgtctcaaaaacaaacaaacaaaaaacttctgggagaaaatatgtaacaaagatggatgtgccaactgctttgggaagcacagagaatagcataattaacaatatacaggagagtgtgggtaggcttcccagaaaaggtgactttggggccacatctaaagagttgttgagacagagattccaggcagaagaaacagccatttaataccagtgttggggggtatgtcacaaatgatatttacacacagaggcatattactttcctttaaaaaaaattaagcagatttcaggtaatccctataataatgtcatttgcactcacattctaatgagctttctcaagcagtaaggaaactgctagtatagttaatgcaatagttaccacctgacctctgttttattggaatgggctacacctgtgaactttttgtgccagggtccagaggcaaagaactatctgaagtttgctggctgcaaggaccagaaacccatcagaccaattcaaggaaaataaaaggggactttatctttaggctttgggtgggatggatctcacagaggccaagggaaataattagctgggattttggatgggctggaagcagagtaaggggagccagtatgactccagcaaacttgttttctctgcctccaggtattaataatacaatgggaaatgtgtctaccaacctctcccaagtatgagatacaattccaactacccagagactaaaactccctaatcattctaatcacaaaatcatgtagaaaaggctctaactgacccaacttgtggtaggtactctcctccagaacagtcatgccagcttacaggcatgaagttcaccaggaagccacctctgtgaatcaagaaatggccaattaccaggaaaagggaaattgtttctagctgaggcggtatcttgaaagaagtccctcacagaactgctggttccacatagtggcaaaacccctgggaaacatttggtagtgacacaggaaacaattgttgagttcttgatttctgcatagtagggaggccttttttaagtggcaataaaaaaaaaagttgttttttttttgttgttttgttttgagactgtgtcttgctctgtcacccaggctggagtgcaatgacatggtcttggctcactgcaacctctgcctcccaggttcaagtgattctcctgcctcaacatctcaagtagctgggattacaggcgtgcaccaccacgcctggctaacttttgtatttttagtagagatggggttttgccatgttggccaggctggtctcgaactcctgacctcaggcaatccaccagccttggcctcccaaagtgctgggattacaggcatgagccaccatgcctggcctgaaagctgtttttttcccagcaaaaaaggggacaaaaactgggatgctctccataagacctctgtaggcacatgataggattgtacttccttacaatagcttggatttgtgaatagccatgtgactttctttggtcaataaaatgtgagtagaagtacagtcacacattgcttaatgacagggatatgttctgagaaatgtgtgattaggttattgcttcattgtgcaaacatcatgcagtgtacttacacaacttagacggtaaagcctaccatactgaggctatatggtataacctattgctcctcggttacaaacctgtacagcatgttacagtactgaatattgtaggcagttataacacggtggtatacatctgtgtatctaaacatatctaaacatagaaaaggtacagtaaaagtagggtataaaatattttaaaatggtacacttgtacagggcacttatgaatggagcttgcaggactggaagttgctctgggtgagtcagtgagggagttgtgagggaatgtgcagacctagtaaattactgtatgccactgtagactgtatacacactatacacttactgctaaattttttttcttgagacagagtctcgctctgttgctgaggctggagtgcaatggcgccatctcggctcactgcaacctctgcctcctgggtttaagcaattctcgtgcctcagtctccctaggagctgggatcacaggtgtgcaccaccatgccaagctaattttttatatttttagtagagacagcgtctcaatatgttgcccagactggtctcagactcctggcctcaagtgatctgcctgcctcggtcttccatagtgctggaattacaggagtgaaccactatgcccggccatacttacactaaatttagtttttaaatgcttttatttggctaggcacagtggctcatacctgtaatcccaacacttcggaaggccgtggtgggaggattgcttgagggcaggagtttgagacaaactgggcaatacagtgagaccccccatctctacaaaaaaatgtaaaaattagctgggtgtagtggcacatgcccatagtctcagctactcaggaggctaaggttggagaatcacttgagcccaggagtttgaggctgcagtgacctacgatcatggcactgcacactagcctgggtgacagatggagagcccatctcttaaaaaaaaaaaaaggaaaggaaaataaataggtaaaaaaagattttctttaataattatctttagcttactttaacttttttagcttattgtacttttaaatatttttaactttttgactgttttgtaataacacttagctttttttttttcttgagaccatctcgctatgtcacctgggctggagtgcagtggtacaatctcagctcactgcagcctcaacctcccaggctcaagcaatcctcccatctcagctccccaagtagttgggaaataacactgaacttaaaacacaaacccactgtacagctgtacattttctttcttcatatttttgttctgtaagctttttttctttttcctttttttctttttttgaaacagggtctcattccaacgcccaggctggagtgcagtggagtgatctcagctcactgtaacgtccacctcccgggttcaaacaattctcctgcctcagcctcccgagtagctggaattacaggtgtgtgccaccatgcctggctaatttttgtatttttagtagagacagtgtttcacaatgttggccaggctggtctcaaacccctgacctcaagtgatccacccgccttgggttcccaactataagcttttttctattaacttttttttaactttttaagctttattgtaaaaagacgtattagccttggcctacacagggtcagcatcatcaatatcactgtcttctaccttcatatcttgtcccactggaagctcttcagaagcaataatatgcatggagctgtcaactcctatgatgaaaatgccttcttctggaatccctcctgaaagacctgcctgagactattttacagttattttttataagtagaaggagtacactctaaaataatgataaatagtaaacacatgaaccagtaacatagtcatttattacaagtatcaagttatttgtattacctgtatcatgtactgtacataattgtatgtgctgtacttttagacaactggcaacacaggtttctttacatgagaagcaccacaaacctgtgactaacgtgttgcactctgatgttatgatggctataaggccactaggtgacaggagtttttagtctccattaccatcttatgggaccaccactgtacatgcagttcatcactgactgcacgtacagtgttgcaccattgtatatgcaaaacatcattgtgtggtgtataattcaccatacatcactcccaggtccaaagctaagtcttgagatatttgtacccccatgtttatagcagcattattcacaataatcaaaaggtagaaacaactcaagcatctattaacagataaatgggaaaaatatggtatatacatatgaaagattatttaatctttaaaaggaattaaattctgacatgctacaacatagatgaaacttgaggacatttttctaactggttaagtaaaccagttagaaaaaggcaaatattgtatgactccacttatgtaaaatacctactatagtcaaattcatagagacagaaagtaaagtggtggttgccaggggctggggggaagggagaattggaagttattgttttatgagtatagagttttggttttccaagatgaaaagagttctggagattggttgcacaacaatgtgaatgaagttaacactagtgaactgttcacttaaaaatggttaatacagggccgggcacggtggctcacacctgtaatcccagtattttgggaggccagggtgggtggatcacttgaactcaggagttcaagaccagcctggccaacatggtgaaaccccatctctacaagaaatacaaaaattagtcaggtgtgatggtgctcacctgcaatcccagcgacttgggaggctgaggcatgagaattgcttgaacctgggaggcagaggttgcagtgagctgagattgcaccactgcactccagcctgggcaacagagagagactccatctcaaaaaaaaaaaaaaaaagttaatacctagatttatgtagatttatgtagattttaccgcagtttaaaaaaaataaataaatcaaatgggccgggcggctcatgcctgtaatcccagcactttgggaggccaaggtgggcagatcacggggtcaggatatcaagaccatcctggccaaaatggtgaaaccccatctctactaaaatacaaaaacttagctgggcgtggtggcatgcacctgtagtcccagctacttgggaggctgaggcaggggaattgcttcaacccaggaggcggaggttgcagtgagctgagatcacaccactgcactccagcctggtgacagaaccagactccgtctcagaaagaaagaaaaaaaatcaaatggagataataaaatggaataaaaaatacttggctactccaaaagaaggacaaaaaaattaaacagggacaaaagccaggtaggacaaatagatttttttaaatagccagattatatacttaaatggtttgaaatcatatctgtaattatattaaatgggaatggactaaatattctagcaaaaggggaaaattaacaaactgaaattaaaacaaacaaacaagactcaactatttgacgctggccaggtctggtagctcactcctgtaatcccagcactttgggaggctaaggcaggtggattgcttatgacctaaatacacaaaataaaactataatcatggcctgacatacagaagatactcaataaatatatcttgaatgaatgggtgcatatatgtgatatgttgctccaactaaacttcacttattcaatgaacagccaaaccaatttttttggatatggacttaaacatgaaaggtaaaacaataaattttagatgataacatacaataatatcttcataacctcaaggtagaaaaagttttcttggccgggcgcagtggctcaagcctgtaatcccagcacttgggaggccgaggcagacggatcatgaggtcaggagattgagaccatcctggctaacatggtgaaaccccatctctactaaaaatactaaaaaaattgccgagcatggtagcgggcgcctgtagtcccagctacttgggaggctgaggcaggaaaatggcgtgaacccaggaggccgagcttgcagtgagccgaggtcgtgccactgcactccagcctgggcaagagcgagactccgcctcaaaaaaaaaaaaaaaaaaagaaaaaaagttttcttaaacagaacagaaaaagcactagccataggaaagatcgataaattgcactttttttttttacaattaagaactgttcaacaagagacatcactaagagagtgaagaagcaagccacagatttgccatgcacataacaaaagttttatatccaaaatatacaaaaactactatatagaccaatagaaaaatgggcaaaaataggctcttcacacacacacacacacacacacacacacagacacaaatccaaacagccaataaacatgtagcaagtgcttagcctcattaatgatgaaaatgaaatacagcgaacaactactacagatccaggtggctaaacattccaagtctgacagtaacaactgttggtgaatgtataagggaagctcttatacattgctgaagggagtgcacttgtataaacattttggaaaacagtttggcattattatttttttttgagacacagtctcgctctgtcccaagcttgagcgcagtggcgcgatcttggctcactgcagcctctacccccagggttcaagaaattctcctgcctcagcctcccaagtagctgggactacaggtgtatgctgccatgccctgctaattttttgtatttttagtagagacggggtttcaccctgttggccaggatggtcttgatctcctgaccttgtgatccacccacctcagtctcccaaagtgctgggattacaggcgtgagcaaccgcacccagtagcattattttaagttaagcataggcatagctcataacccagaaattctgctccaaaatacatacccatgagaaacacatgcccagatacagcagtagacatgtacaagaatgttcacagcagcattatttataataaccccacgttggaaacaacccaaatgcccatcagtagcagatggaataaattgtgatatattcactcagcagaacactacagacaacactgaaaatgagtgaagtatagctgtgcacagtaccatggaagaatctgataacgagtgtgaagccagagaagtcacacacacatcttaagactgcctttctataaaacccatagccacacaaaaccaaacatgtccctcccccacaatcccccaccactcctctacttatgagacacagaaagagtggtaatagagacagatttcatggtaactagttagggaatcaccattttgtacccaggcacagaaaaccaaccccctactggaatatctcctgcatgcagggatgaggagagaaactggccttcgaggtgagggaattcaaggaagtgactgacagctctctgctgtggggatagagaacattattacggtcaggccacccttctgttagaatccattgtgatgacttcagtgttacttttttttttttttttttgagacaggggctcactgtcacccaggctggagtgcactgtcactatcatggctcactgcggcctcgacctcccgggttcaagtgatcctcctgagtagctgggactaacgcagcaccatgcccaactaatttttctatttttttttgtagagacagggtttcactatgtagcccaggctggtctcaaactcctggctcaagtgatccacctgcttcagcctcccaaagtggtatgattacaagtgtgagccaccatacccagctacagggttattttaataaagtcactgaaagttagggggtcataatgacccatttatagcatgctaaactttcatcaggcactggaggccacgatatgggacaacaagcaattcctgaggtgcactgcacattagcaaaagaaggccatgcagctctggaaagattctcaacaataaacataattaagtttgttgtatgttcctccagatttttttagggtatctaaacgttttttattataaatatggtattatattacatgtattgtttacctttttaaaacttaacagtagctgctaaacatctgttaaacatattttaatacatagagacctacttcataatttagggggtgatggaaacttcataattctgggtgtgattaatatacttattaccttgattgtggtgatcatttcacaggtacacacatcaaaactcagtgtacactttagatatgtgtttttttgttttgttttgttttttgagatggagtctcactctgtcgcccaggctggagtgcagtggcgccatctctgctcactgcaagcttcgcctcccgggttcacgccattctcctgcctcagcctcccgagtagctgggactacaggcgcccgccaccacgcccagctaattttttgtattttttagtagagacggggtttcaccatgttagccaggatggtctcgatctcctgacctcgtgatccgcccgcctcggcctccccaaagtgctgggattacaggcgtgagccactgcgcctggcctagatatgtgttttattatacatcaattatacctcagtaaaactgaaaaaaggttgtgttttaaatctctccccaccgtttttttttttttttttttttttttttttggcacgacagggtctcactcctctgcccagactggagcacagtagtgtgatcatagctcactgcagcttccaactcttgggctcaagcaatcctcttgcctcagcctccagagtagctaggactacaggcacgcaccaccatacccagataattaaacaaattttttttgtacagacagcctcttgctttgttgcccaggttgatctcaaaatcctggcttcaagcagccctccctccttgacctcctgaaatgttgggattacaggcatgagccaccacgcctggccttgtgttttaaatcttttactgttttcttccacttaacactataaattccatccatgctgttttatgtctatttcatgtagaattccaaggtatgtatccacaacattttactaactcatcccctagttcctttgcctctagttcctgtatgccattaacactgtaacaaataacctcctgcttgtcttcttgcggatctgagcaaactttcttcaaaatgtatttccaggcatgagactgctacactactgagccctatgcatacttaattttactcagaactactggcttattttatagaagggctgagcaagtttatattcccaccagtccaatctcttcacatgggtttctgacccttcgcgttgcagtaacactgagacgatggatgttcattcctggtgccccgattcaatttgaaattgacttcatggtcactgacaaattattcttcaggttgtggcagggctgaggccatttcctagtgacttaacagatggaatttgttctctattttcacttgctttttaaatgttttcggggaggggtgcctgttagagacaggagcactacagactgtcttccctaggcactccctggcagccttctaagtccctaactacatggagaaactgccttgggtcagtgttttaagctgcaaggaatgttgtgactcagctagtcgttcagggacacctcgatgaacaaggccacgggaaggaagtcattacacagagagctggactgtaaaaaccaaaaatactctacacaccaaactctagagcagtgcagcagtacatcccatgactcaacgggacagcttctgccacgtggcacacagctccggatatgtggtgcgcagccctcactcgcggctctgctgccgctctgagctgcttggaaagttgatggggtggggaaatctgtgactgtattctctctccaccccctccactctgaccattgctcctctcatcagctccccctcttcctactccttctttaaccctcttgccctgcaaaaacaaaaacagctggaatttagtatttcacacatgctggcaatttagtggggacacatggaggtcaaaacgctggcactctaggaagaccctactgatcaggcagacactgggcaacaggtcatatcacctgggacagggtcaagagtactgggcaaagaggcagccccaaggaacagagacttcaaggtacaggcaaaacctttaaagatgtggacattcactcactaatctttatcagagacctactatgtgccagatgctttttgtttgtttctttgagacggagtctcattcactggagtgcagtagcaccatctcggcacactgcaacctccacctccagttcaagcaattctcctgcctcagcctccccatgagctgggattagaggcatgcaccaccacacttggctaatttttatatttttggtacagacagggtttcaccatcttggcctggctggtcttgaactcctagcctcaagtgatccacccgtgttggcctcccaaactgttgggattacaggcgtgagccaccgtgcccggccccagactgttcttaggaactgtcagtgaagacagatcagatgtcttgtcctcacggggcctgcattcttttggagggagacacacacataccagacatcctcaagaagtgaattagcactcaaggaagttgttagggctactggaaaagattagagcacagagaggtgtctgggcatggtcagggtagacttcatggacattggtgtggtcttgaggttagtgagggagccagccaggtaggcatctagggaaagaaacttctgggcagaggaaacagccagtgtgctttttttttttttttttttttttaaagagagagtcttacgctgtcactcaggctggtgtgcagtggtgtaatcacagctctgcaaccttgaaatcctgggctcaagcgatcctcccatctcagcctcccaaagtgttgggattaaagacatgaaccactgcatctgaccaagtatacttttaagtgtactcaataattggtttccttttcctcatctataacaacagtttctaccttttgtccagctcctgagagccttgagttctaatcacaacagcccctcactcccagtggcagcccttccatgcagcctcccctctctagccccactctgcctgttagcatctgcagccatggtgcaggcctagtacatggatgagttcccagactgctggaggcagccccaccaccccgagcccctggccacccagtgggccagaaacagccatgctggctcagggtgcactactaaagctggacactgacaaatgagagaatgatccagaattagaaaagactcaaagagagagaagctactcctggatagacataataaccatatgtaaagataaattaccaaattatgaagaaaagattaaggtgttttatggggagcatttacacttggatgatcggatctgttacatcccgggtggcagtggatacttttgatatgacagataaagaagacaagtgaatctacatcttcatggagaaaggagacataactctccccacaggaattcgtcaccacctcactctggatgaaaagaagtacgtgaaggccatatggccattcagggagacccagtgtggacagcatacaatgggccagctgaccatttcaatgtccagggacaatacatgaaatttctggcacagacagcatagcagggctccctgagaacatgtactttgtgaaggtcctaaacgtaactgagcacaaaatcatttttctctttgcttttatacggtaaacttgtctttcctttgcaagattatttgatcagaatgttttttatcttatttttattttttgagacagagtctcactctgctgcccaggctggagtgcagtggcatgattccagctcgctgcaatctccacctcccaggctcaagtggttctcatgcctcagcctcctgagtagcttgtatacaggtgcacatcatcacacccggctaatagaaacagggtttcaacatgttggccaggctggtctcaaacacctggcctcaagtgatctgcctgactcagcctctcaaagttttgggattacaggcatgagccaccgtgcctggctcagaatattttttaatgaaaggagcaataaaactgatttttacatggaagcaactgtggaaatgaagacaagtcaccttcgttttgtctaatgcaatcaagactagtggttcagtagccctgtgttagtacatgcactcatctttagtccaaatgagagtttcatctcccaaaatgtatctccttagatgttctatctggacatgatattgtgcctgccttgtaacaaggtgcaatggtagataaccagatagaagacactttttttctcccaaaattatacactgaggtggggaattatacacatagagggaagagctcttatgttaggcgacacattctgagttgcttatgccactttcttgttcaaaataaagtcattgctgggcgcggtggctcacgcctgtagtcccagcactttgggaggtcgaggcgggcagatcacgaagtcaggagattgagaccatcctggctaacacggtgaaactccgtctctactaaaaatacaaaaaattagccgggcttggtggtgggcgcctgtagtcccagctactcgggaggctggggcaggagaatggagtgaacctgggaggtggagcttgcggtgagccgagattgctctactgcactctatctagcctgggctacagagcaagactccatctcaaacaaaacaaaacaaaacaaaataaagtgactgcctcaattttatgctcatggcttggcattatcttatattcaagtatatatggtattttgcctagcttgttaaaatcaccagtttagattctttgtgtgactgtatatgtatgtgattaatgtgtatattatctgtgttggtatttttttcagtgcgagttgtctaggttctttcacaatcaagattttaacagaattagtattttaaaatttatcaagagaattagtacgttatttttctactcaattctaagactctactcaattctaagacacaattatgcctagttcgttataatcatagaaaaaccccaaataaatttcatgttttagaaggtcaggttgttttctaagtatttttctaaaactggatgaaaatttttcatgttaaaattaatttttcattactttcacactggtcttgggggtctgtttctcactgcacagaggaaagtcgatccttaaatgttattatcatggtgcctgtgtacattttaatcctgaaattattaattttaggattaaggccaggtgcagtggctcacatctgtaatcccagcactttgggaggctggggcgggtggatcacatgaggccaggagtttgagaccagcctggccaacatggtgaaaccctgtctccactaaaaacacaaaaaattagccaggcatgtggcacacgcttgtaatcccagctactcaggaggctgaggcaggagaatcacttcaacccaggaggcaaaggtcacagtgagctgagatcgcaccactgcagtccagtctgggcaacagagtctctatctttaaaaaaataaataaaattgtaaaaaaggattaaaatgtagacaggaaccatgataacataaatatcatagggctttcttctgtcaaattttactctgataaagtgctgatctgatttttttttatggattcatttctaaatggtcattgtaaaatgcaacttccttcttcttggagacagggtcttactcagttgcccaagctggagtacagtggcatgatcacagaatcacagttcactgcagcctcaacctcctgctctcaagcaatcctcccacctcagtccgccaagtagctgagactacaggcacgtgctaccacactcagctaatttttttttattttttgtagagtcagggtctcactatgttgcccaggctggtctcaatctcctgggctcaagcaatcctcctgcctcagcctcccaaaatgctaggattacaggcgtgagccaccacacctggccaaagcagaatattataaaatgtaacataatcacaggagtgatattccattacctttgccatattctattggttaaaagcaagtcacaggtcctacccacacttcagtgaaagggatgacacaaaggcatgaacaccaggaggcagaaatgcaggggccaccttagagtctgtctgccactgaagacagtaacaatggatctggaatctgaaaaatgagttggcatcaacaatgtggacagagggagggaagaactgtccaagcagagaaggggcaggacggtgaaagcagatggtgtgtacaacttatacaaagggcctagtctagtgactagcaataccgtatcactctcctgctcaataatcattgatagctccccagtgcccatggttttgccccatattcaaggttatctccttgcattcgctttgtcttcaatacccatgccttcactcaccacttccacccacttagactgcctattgcctcctatatttaccccatctatatatagttcaaggcccagcataaactgatattctgtaaacaatatttctgaatatctaagtggagggcactgtgccagatcctcttggagttgcaaagcttaagacatggtccacatgccagatggagggcgggtgggggcagaaggtacaccccaagaagaaaaagaataggaggtccctttgttgaggatcaaacccatggggcagttgggaaatcctgaagggatttttaggccacagaaagctccacttcctacattggttaatgatctttcaggattcctctccaggctagaaattacaaacaaattccaaaaaggctgctaaactgacgtctttccgggagtcgggaaccgcacagttgcaatctagacaagccgggtcactcctcatctggcacaaaaggtacctttagcaggagctgcggatggcaacagaagtctcctgccctccagcctgagggtccctgataacatccaggaattgtttccattggctgggaggagaggcccccagtggctgtgcacagttctggccacatcctcaggagaaggaaacaaggaaggcaaaagcaacccagccagggacacagagcaggaacctctccagccgggggcggagggggctgctcccccagctccatctctcacctagcctaggaaggagctgcgcttggacccggcagccccgacctcgcaaccacgtacctgcccactgctcactgacatggctgggggttgagcaaatgtcttgagagcaaaagctcctggattgaaggaagtggggaggcctggcacctcctgggtctctcttcacaccccaatttccatcttctccagcatttactccacctggaaggcagaggctttaccctcagcactcactacagcgtcttccttcgctctgagggcagggattttatacccttcccacctcccaacctaaactatccccaggtggctcagcctggcctttgtacaaatgagtccctgcacctggatcactgtgctcacctgtcttcacctaattccaacttacttttccactctctggaaagcattctctgacccttcccaccccactatgggctcctgggcttgccccacctcaggtttcatcatcttatattgcaattccctggctgctggtctgttcttcccctcccctccccatcctctaagactatggggctcctgcagcatctctagtgcctggcccaggcatggtgctcaggaagaacacaatcaccctgttgtcctctgttcctctgccgggatgggagagtctggtagtcactttatcttttacagcagcaggtctcagactagagtgagcatcagaatccacttggtggtgcaggcagggagggacttattaaaatacagattctgggccctacccccagagtttctgattcagtaggtctggggtagggcctgagaactggtatttctaacaagttcccaagtgctgctgctggtccagggaccacactttaagaatcactgttggggctgggtgctgtggctcacgcctgtaatcccagcactttgggaagccaaggtgggtggatcacttgaggtcaggagttcgagaccagcttggccaacacggtgaaactccctctctactcaaaatacgaaaattagccgggcatggtggcacgaacctgtaaacctgtaatcccagctactcaggaggctgaggcaggagaatcacttgaacctgggaggcagaggttgcagtgagccaagattgcgtcactgcactccagcctgggtgaaagagcgagactccatctcaaaaaaaaaaaaaaaaaaaaagaatcactgttagcctggcatggtggctcacgcctgtaatcccagcacctttgggaggccaaggtgggtggatcacttgaggtcaggagtttgagatcagcctgcccaacatggtgaaaccccgtttctactaaaaatacaaaaattagctaggcgtggtggtgggcgcctgtaatcccagctacttgggaggctgaggcaggagaattgcttgaacctgggaggcagaggttgcagtgagccaagatcacacaaatccccatctcagggtgtcagtttcttcactggtaaaatgggataactactgtccccattatcctgggttttgtgaaaatccaatgagataatgcaaatgaagaactcatgcacccagtaggtgctcaataaatgttagcgatccctcctgggagtaggcaggagacatggcaggcagggaaagcatgaacaggagcagagatgggaaaggtcccaagcaggtcagctgggctggcagaagagccaaggcccagcacagcagccagggagtgtcctgtagaagtaactgggagccacgcacagttctggagctgggcagtgacaggtggaagctgaatgtggcaacatggggcagaggccattgccggcagcaagtcccacgtgctggagacttggctgtttggctagacatagggttgccagatttagcaaagaagataaagtatgtccagttaaatttgaatctcagatgaataatgaatactttcttttagtataagtatgtcccaaatattgcttgggtatacttatattaaaaagcagttgctgtgcatctgaaattcagatttacatgagtgtcctttatttttatttgctgaatctggcaatcccaactagacaccagttgcctgccccccagcccttagtcctgcatgcagtgggagacccagccccagggtccactgcctcccttcccaccttcaacaaagccaccaggagtgattgatgagctgctcccagaagccagtattgctgctctgagtgatcacaactacaggcctgggtaagggggccctctcacctcatgccaggttcacccagcaagaaagtagaggggcacagtcactaaccactgggtctgtaaattaacaaagcacatagggtgaatggaatgactcatcccaggactttgagaggcagagacaagaggattgcttgagcccaggagttcgggaccagcctgggtgacatagtgagacacccatccctacaaaaaatttttaaaaattagctagatgtggctgggcaccgtggctcacgcctgtaataccagcactttgggaggcccaggcgggtggatcatgaggtcaagagttcaagaccagcctggctaagatggcaaaactctatctctcctaaaaatacaaaaattagccaggcatggtggcaggcacctgtaatcccagctactcatgaggctgaagcaaataatcgcttgaacctgggaggcggaggttgcaataagccgagattgtgccactacactccagcctgggcaacagagcgagactctgtctctaaaaaaaaaaaaaaaaaaaaaaaaaagccaggtgtgatcatgcatgcctgtggtcccagctcctcgagaggctgaagtaggagaattgcttgagcccaggaggtcaagggtgcagtgagctgtgattgtgccactgcactccatcctgggtgacagagccagaccctgtctaaaacaaaacaaaaaaacaataaaacacataagctaccaaattctgtaaagaaggaagtaccacctgcattcttggattaatgaagaaacaaacagctgccagtgatataggctcatccgatgagtatacccaagcagaggaaaaaatggcctccaccttcaaccccagaaatgggcaaacacaagtgtccatgctgcttgcaccctcagagaaagccctggagatggtgatgtcaaccacaagctagagtgggacagtctctgccttattcagttccattcagtgttagaacaagtcatactagcagaggctgttctatctgcctttcttctcctaccctcatcaccaaatcccagatgattgagagttccagaaacgagcctgtcagaaatgcaatttttctttttctttttttttttttttgagacaatgtcttgctctgtcacccagggtggagtacagaggcgccatctcagctcactgcaacctccacctcctcggttcaagtgattctcctgcctcagcctcctgagtagctgagactacagctgtgcaccaccatgcctggctaattttttttttttttgtatttttaatagagacgggggaccgagcgcagtggctaacgcctgtaatcccaacactttgggaggctgaggtgggtggatcacgaggtcaggagatcgagaccatcctggctaacacagtgaaaccctgtctctactaaaaatacaaaaaattagctgggcatggggatgggcccctgtagtcccagctactcaggaggctgaggcaggagaatggcgtgaacccggaaagtggagcttgcagtgagcagagatggtgccactgcactccagcctgagtgacagagcgagacttcatctcaaaacaaaaacaaaaacaaaaaaacagagatggggtttcaccgtgttggccaggctggtctccaactcctgacctcagacgatccgcccacctctgcctcccaaagtgctgggattgcaggcgtaagccacctcaccccagccgcaaatgcaatttctgcaacaacctttatatcaactttttttcctctaacaatgaacaatgaaaacaatttgtgctccatctttaaaaatgtgtgacacaaaaattttttaaataaaaataaatatgtgataaacattcctgaatgcctagtgtgtgccctggcgctgtgctctgcatttaatttggatcagcagttctcagccttgtttgtacattacaaccaactggagaggtttttaaactcccagtatccggggcatcagtattcgtctagggcacagtgattctaacacacagtcaaggttgagaaccacttatttaattcatcctgtaaatcctcacaatagaatcctgcaaggtagcttttatcaccacctttgccgatgaaattgaggctcaaagaggtaaattgatttcggcatctgtagccccaacctgtgacctctccttccttccttctcgggctcccttcagggatttcctgatgttacagaaaatggtatgtatgacgctgccctcctggccaccttgacatagctctgctcccaacagggctcttctgagatagcagccagacactacctgggatcaggactgatactaaatgacttctgccaaaatgaggacaactgaggccagtcacttccaaacaggttctgtcaccctgagtcagaataatggcagctacctctcctcctcaccgcccagtcgtttctaagcctggctcgtcgccgttgctgctccgccaagcctttcctcggtgccctctctcttttagaacaaattacttcatctccaggcccttctcagggcagcttctttgcaggggccatagggcgtcggaaaggtctttggtccaggaaagccgcgagccacagatccaagaggaaaaagccgttcccggcccgggccttgcccaaggcacgagagtaaatgcaccttccgcgtgcctcggcgcacctgggctcacctgtcccctcccgcagtgcctgcagacagggagggagcgcggctgggccagaaggctgatcaccgcctgccccctgctggccagtgtcagtattgagcccgctgccgctcgaccagaacgtcccagggatggaatgaaggtgcgggcatttatggagcgcctgctgtttgtcaggcgaggtactgataagcgctggagtgtaaggatgtacgtgacctgctctcagagttcaaatttaaatgaagagatatacattaatcaagtagtcattcaagcaaatatgaaattacaactgtgggctatgcgaacagatgacgcgaggggcctgtccagtctgggagatacgggtgggttcaggaaaagctgcccccaggaggggacgtttgagcgccaggagccgcgcaaagtcatttcatgtcatctctaaaatcctgcaaggcggctttcccccttgacaaaacaggaaatgggatcaaattgaggaaggaattcacccaagatcacacagcaagctggaagcaaatctgggaggagctaggtccgccccgttccgaaatccacacttttctggaggtggggcaggcggtggcacagggacttggggcggggtctggtgggcggggcatgaagtctggccccgcccccgcctccgaggccaaagggcgccctgggcggggatcggagcaggggcggggtctttccagggagtggagcctgggcagattggggcctgtggaggccgcactaggatcgtagaaggagtggagccgtgctctcaccctgtcttagaggacccggaagcgccaagtgactgagggccgaagacactcacctgtggagcctgtgcacgtaggtagaggcggcggctctgagtccaggagctccagtgggcagctccccaggtagggcccaactcggggggagaagagatgaccctctcccctcccgccctgcccatctgtcctgccatcctacattccttccttcctgtccgcgggcctgggtccacccctagctgtaagatggggacgcaggggtggagggactggcctcattttgtccctttttccctggcccagcggctgcaggccccctggacacccagaacgtagagtctggagaggagacgtcgaaacctcccaggggaggctggcccagctttaccccagcctgactgtgtgaccttgaggaggacagccactttctctggtacccagtgtcctcagttgcaaaacagtgactggcccttgccctgcttgccctgagactgggcagatcagatgctgtagctgctgggggctggggtggcgctttctctctactggggcactaggagtgcttactctcctgctccctctggtcctcggtggagagccacacccttcatccacccaaacctgggagccccgagggctgagagcctagtcctagggcagcttgctctggcttccctgtgctagagttgtagtctagcctggaaggcctgtgaacatccccaaggtggggtgtgaggcctacgtggagtgcacatgctcgttttgcaaatagtggtgccaccattgtgcatggccttgagtgccaagttaagaagtccaaactccgctgggcgcggtggctcacgcctgtaatcccagcactttggagactgaggcgggtggatcatgaggtcaggagatcgagaccatcctaacacggtgaaaccccgtctccactaaaaatacaaaaaattagccgggtgtggtggcacacgcctgtagtcccagctactcgggaggctgaggcaggagaattgcttgaacccagcaggcggagcttgcagtgagccaaaatcatgccaccgcactccagtctgggtgacagggcaagactccatctcaaaaaaataaataaataaaagaagtccaaactctcaactgctggcaggggcagttcatcagagtatgacctgcagtgcccacaggaccagcctgcatgagtggggctgtcatgatgctgctgctgataggtgtacatacaggtttttattgcattccagggctttacacaaagtcattagttactcacacgtgcctgatgttattcccattttggaggctgagactgagggtcagagagatgaagtcacttgcccatggtcacagctagcaaatggcggagtggggatcagcacccagataatctggtgccttttctcctaatgtcctgtggccacccgtgatctgggcatctggttataaagtcttaacctaggacagctggagaaaggaggggctggatgagcaggaaattgggggagaagattcagagggctagggagggagagaggggtagtgactagtcctaaggggtattcggcttcctgggaaggtgtgaggagtgaagtggctgattttagacatgttagtttgtgggtggagggtgatagaggggagccaagcagagctctcctctgtctggaaaagaacaaggaggtagagctgggtcctgggaaaagggggtgcctaagggataggtgaagacagaggcgggctcacagaaggcccccaaaatgctgagcaggcagatgtgggggggctcactggaagcccccaaaatgctgagcaggcagatgtggggggctcacagaaggcccccaaaatgccgagcaggcagatgtgggggacatccattggtgaagtggggggaacagagagaggagagaattctggactcccgtgacattagatctgagggagatgggtctaaaaaactgaggccttggttcacagaaggggaaactgaggccagccagttacttgcctgagaatactccagggctggatccgagtaggaccccgggtgccatctctgctattcggccctttctactagatcgtggttctcagctgggggcaattttgtcccccaggagacatttaaaaatgtctgaagacaatttggctgtcacaacctggagctgcgggggatgaagtgctactggcatctaatgggcagagaccagggatgctgctgaatatcctacagtgcacccacccaccccccagcaaagaattatctggccccaaaggacagtaatgctgaagctgagaaactgcactagggcttaatagggcagaaagctcaggcttgggcctccagctggatggacctttgccccaaccccggctctgcccctccccatgcttgctccttaattcctggaagcctctggagtcctctctgcttttcctgggcacagtggtttagaggtctgcccaccaagtgtctgtcaccactctgtctccccagacctgtattcagagtttggcattaggtagggagaaaccaaagtggaaatgtcccatctagcacatggcaggtgccttgcagataaacttgatttgagtgacatcttaggggtccagggagtttcatttcatcccattttcactttggcaatttgaattgtgtcttatgtttgtgacgctctgacatagactgaaagaatccactgcttcatccgatgtcctaggatgggcaggatgtggcattatctgagaaatgctgtggaggtgggggtcttgtcgtttaggctcttccaagagtagactgtggactgggaacacaaaagcagttcctttcaaacacatgaaaggctgcaggaatcacctcgggatcctgttaaaatgcagatgctaggccaggtgcaatggctcacgcctgtagtcccggcactttggtaggccaaggtgggaggatcacttgagtccaggagtttgagaccaacgtgggcaacatagtgagaccctgtctctacaaaagaaatttaaaagttagccagttatggtggtacatgcctgtagtcccagctactcaggaggctgaggcaggaggatcactagagcctgggaggttgaggccgcagtgagtcattttggtgccactgcacaccagcctgggtaacagagtgagatcctgtctcaaaaaaaaaaaagaaaagaaaagaaaagaaaaatatgcagatgctgattcagtagggctgagttgggcctaagtttctgtttctaacaagctcccaggtgatgctgatgctgatgtttgttgctggtgcataccacattttgagtgcagggcattgcagggctgtgcagaagtggccatgggccatgcaaccaactcttgggtggtttggaagcatggagtggaaggagaccatgctctagagtcaggagagctggatatgagtctttactccctctctcccctccctataccccttctatggcctgtcagcttagaagagcttgaatagtttcctcacctgtaaagtcacttaaccttgggtaagtcacttagcttctttgctaagtggtcttgcatggcaggctgtcctccaggggttctgacccagggtctgagagaagaaagtgctctgtagagataggacagtctgggtcttggcaggcagaggggcagcaggccactggcctggccaggagggcaggggtgatcacctgaagctgctggggcaggcactgtgccagcttggaggaggctctcatcatagccctgttttttctctgaggccgcctcagcctcctgctttgggcttacccaggcctgtctggtgtgggaaagctggagagaccggtctggctgggggagggagcagcttcagtgggctgaggccagcccaaggcctgattgtgggtctgagcgcctagccagctcagccctggtctgaggagctggggttagggttgaaattggggtctgagaactatagcctggacaccgctggggtcaggctgtgcatggacaggcttcccaccagggaaactgggaaggaatttgtagtttggggccttaagcccccagctataggggatgctctgccttgagcatctgaccccaggaatggggctgaacagagccttgagtacctggggtgctcccacccttggtcccccataagtcagctacaatcgcccagcaagacaccttccaactcacaggaccagcagatagcaagacagctgagcccatttctcagatggaaaagtggaggctccttcgttcccacttcttgggaaaagaagagtactcattagcacagtcacccattatccagcagggccctgggcctgctatctaatgaggctgccccctcttcccaccccctccgttttcacagttggaccatcccagtggaaccacacaaacctgggttcagatctcaggttccctccttcatagttatgaggctctgggcaggtcactccacctctctgagcctctgctggctcatctgtaaacaggaataatgacacccgctcagccagccccacagggttgttgtgaagatgaaatgagccgtacccacggaacactgtggtcattatcattagtcatggcatttagaggcacgaggcaactgggtattgttttaccttgtgccctattttacagatgtggacatcggcacttggggaaggaggcggctgcccaagggtcccttagcagggcagtgggcaagctggggttagacccacatctacaggtgtacctcccatcgcacagctgctgccatctgtgcaaaggcactccaaggcgtgacacaaatgtaaacttgggggtctgtgtggtcaggctgcaggagcttcttgtggaggagctggagcagacctttgtgcaagccactgcctttctttgccagcaccagccatgaactacgtggggcagctggcggagacggtgtttgggacggtgaaggagctgtaccggggcctgaacccagccacactgagcggcggcattgacgtgctggtggtgaagcaggtggacggctcgttccggtgctcacccttccacgtgcgttttggcaagctgggcgtcctgcggtcgcgggagaaggtggtgagtgctcaggctggctgaggtggctactgcagagtgggctttttaagctggggcagccactacagtcccaggacaggacctggggcctcccttaggtggggatctgtcctctggacaggcttcccttcatttgtactttctttgaaggtttttgggttgatttgggggttttggtctgggagggttcacagttagtttctcatggaaacagaccagtagggctcatcccagtgctggggccgtcagacctggctcagcttactaagaccttacctgtgtgttcttggtaagtcacttcatgcctctgagcccagttacttcacctgcacaaatggatatgattttatcggcctaatgatgctggtgggacaagtcaatagcaactgataatactgtctcagggccagctatgtgggaaacactcaaatgttagtttctctctcttaataaatccacttcaggctgggcatggtggctcacgcctataatcccagcactttgggaggccgacgctggtggatcacctgaggtcaggagtttgagaccagcctggcccacatggtgaaacccagtctctaccaaaaatagaaaaattagccgggtgtggtggtgggcacctgtaatcccagccactccggaggctgaggcaggagaatcgcttgaatccaggaggcagagattgcagtgagccaagattgtgccattgcactctagcctgggcgacaagagcgaaactccgtctcaaaaaataaataaataaataaaaataaataaataaatccattccaccttcacagggctcaggcaagcacagcagagatttttgttagcagcaaggtctagggtgtgaatcaagattcacactgaggcaactgtgacgtttccaggatcctaatagaaaagtgtagcctatgggaaatagtatatctaagaggctagtagcttgggttgtagactcagcctttttggcttcataagctcacttgctgtgaggctgcctcctaaccaattactcaaacccccaaagcctcagtttcctcatctgtaaagtggaggtaatgataggagctactgcaaggggttgcagagattaaatgagataatctatagaaaacactccacaaagggccagtacactaaaattcccaccattgtttatgcagccaataacctgggggctggggacacagcgatcacaagagagaccacgtccctattcttatggatgtgagagacagagggaagaacttggaaaccaggcaatacacaagaagaccgagacagtgacaagtacaatgaggctcagacagtggggcagtgtgagtgagggagagatgggtagggagctcagtgaaggcctctctgaggaaggggagatgcagcagagccccccttcgtggggagcagccaggcacttgaggtccggagggagggaaccccagcaagtatggtgtttggggcggcaaggagccactggaggaccagccaggaggcctgtggtcggaagcatgggcgtgaaggcccatgtccctgccaccgctttccatttgcaggtagacattgagctcaatggggagcctgtggacttgcacatgaagcttggggacagcggggaggccttctttgttcaggagctggagagcgatgatgtgagtctgccctcctaacagcacctgccccgcccacccctttcctgtgcctcttctgggcagagccttgggatttgtcaccatcctcgcccttccccgggagcaccccaccagcagaggtctgaggcaggggtatcagttggggctggcctctggcacacgtgatatgctgtgggggcccagaggaagaggccagggtaccaactgactctatttactgggaagttggggaaggtttctcagaagactggacccctgagctgggcccctgtgggatgaaaaggaggccttccccaggcagcttgaagaggaggcgggagctgaagaaaggggctgggaagtataacatctggcttgtcctgggtctggtgccagctccgtgtggctggaacctagaagtgtgtaagtggtgggtgttcgcacaggggaggcagggcccagcagaagccagcagaggagttgaaacagaacttgaaaaactttgagtccctactgtaggccagacactgtgcaacagactcagatgacgggtgacccctgccttcaaagaaagttccaggctgttctgggagctagacacataaacaatggatgatgagccgtttggtcattgcagtgagggatgttgggattgggagagggatagtcaaggctccttcctggaggaggagacatatggctgaatcttaaagcagaagtagatgtctgctgtcatagacttgggtagaagaggagatcagaggccgatgccaagatctctgcctggcctgccagggtggcaggtggctctgttggggacctctgaggccagcagtggctacagggccaggctggtgcctccacacctgttttcctgaccctaaatgagctcactccagggctgggacccaggcaaggctcaagatgactgtgtggtgagcgcagccccactagggtcagcccccgacctcagttcttggtctgttccacaggaacatgtgcctcccggcctgtgcacctcacccatcccttgggggggtctgtctggcttcccctcggactcccagctgggcactgccagtgagcctgagggcctcgtcatggcaggcacggcctccactgggcggaggaagaggcgtcgcaggaggaaacccaagcagaaagaggatgcagtggcaactgattctagtccagaggaactggaggcaggcgctgagagtgagctatccctgccggaaaagctgaggccagagcccccagggtgtgtaaggaccaagggacttgaaccccagtttgggggttcaagtgctgtttcctctgctcatgctgtgtgactttgggcaagggccttgacctctctgagcagtagttgcttcaccttaccaagcccctgatgtccaggctctcatgcctgcctggggcatcctgcctgatcagtgaccatttccttgtggccccttagcagtgtccagttggaagagaagtcttcactgcagcccaaagacatctacccctactcggatggcgagtggcccccccaggccaggtaagagtccaggtgggctgcaggccaggactccagatcaaggtctgaggtttccatttgcatttttcctgatgactaatgacacaggacccatttaatgtgtttactagccattcgtatttttcctttgtaaagagttcaagtcttttattgatttttttaaattgcggtaaaatatacataacataaatttaccattttaactatttcaaagtgtatacagttcagtggcattaagtacattcagtgttgaatgaccatcaccactatctagttccagaacatcccatcccccaaatggaaaccctatgcccattaggcaatccagctacaactttgccatcttctttttttttccttccttcccttccttccttccttcctccctcccatccttcttcttactggattgtcttcttcttgttgattagtataagttattcatatatttgtatactctttagatctttacatattccttatatattatggattcaacacaggcataaatataggttgcacatatttttttccctggctggggtgggcagcagcggggatgggtaggcaggctcaaggcctctcaatatgtctcctgcagcctctcagcaggtgagctaacatcccctaagagcgactcggagctggaggtgcggaccccggagcccagtcccctaagagccgagtcccacatgcagtgggcctgggggaggctgcctaaggtgagtccctctgtatcaaccccaggcccggcctttcaggggctctgtggcccccatgggtcagggttggagggactgaaactcgggccactgccccaaaagctttgtggggcatgggccttaccctggcccacatcttcctccatttgttccactaaaggtggccagagctgagcggcccgagtcctcagtggtccttgaaggcagagctggggcaacctctcctcctcggggaggacccagcactccctctacctctgtggctggcggcgtggaccctttgggactcccaatccagcaaacagaggctggtgccgaccttcagcctgacacagaggatcccactctagtgggtccccctctccacaccccagagacagaggaaagcaagactcagagctctggggacatgggcctccctcctgcctccaagtcatggagctgggccactctggaggttccagttcccaccgggcagccagagagggtctccagggggaaaggtgagtgacgctgggtctctcccactgcctccctggcctcgctctgtcccctgggtgggtgctgggacttcaagtacattttgagcacctgctgtgtgctaggtgctgttcttggcaccagcctcatgaagctcacagtgcagtgtgggagacagatgctgcatgtgtggaagggcgtgccacaggcatagtcattggttggaatgggagctgtttaaaccaggtggtcagagaaggcccctccgagaaggtgatgttggagctaagacatggataatgaagattcagccaagtgaggagcaggggaagggaattctaggcagaggaaacagtatgtgccagggatgtaaggctggagagaagtttcatgtccagaaactgaaagcagctggcgtgccttgagcaagaaatggaagacggccgggataggaagttggggagatgagcagactcagatggctccagctcacaagctcaggtttatctaaaagtgctaggaaagcacgagacctgtgctgtccaaatcagtagccactggctatatgtggctatttaaaatcaaattagggacagcatggtggctcatgcctgtaatcccagcactttggaaggctgaggtgggaagattgcttgaggagttcaagatcaagcctgggcaatgtagtgagaacccatctctacaaaaaaaaaaaaattttttttttaactagccaggcatggtggcatgtgcctgtagtcccaactactgaggaggctgaggcaggagggtcacttgagcccaggagttcaaggctgcagcgagctatgatcatgcgatcacaccactgcactccagcctgggtgacagataaataaaaattaaaaattaaattaaattaattgcaattaaaatataaaattccattttttttttttttgagatggagtctcgctctgtcacccaggctggagtgcagtggtgcgacctcggctcactgcaacctctgcctcccgggttcaagtgattctccttcctcagcctcctgagtagctgggactacaggcacatgtcaccacgcccagctaatttttgtatttttagtagaaatggggtttcaccatgttggccaggatggtctcgatcccctgactttgtgatccacccgcctcagcctcccaaagtgctgggattacaggtgtgagccaccacgcccagcctagaattccatttctctgtcacacggtgatcacattttaagtgtgctcaatagccacatgtggctagcagctaatatatcaggcagtgcagacatgggacatttgtatcactgcagaaggttctgctgggcagcactgccttagagaattcagagtcagagggcacttactgtccacactgctgagcacatgtcagctctacagatatcctctcttcaactctcaggctccccaaagagaagccagcacctgggccccagtgacatctacctggatgacttgccctccctggactctgagaatgcagcgctttacttcccccaaaggtgcctgggttctggatgccagggtgtcttgggtctgggctcctggggccaagggtccactatcaagggcctgtgaggagggaggacccatctcccgccctcctcgtattcttgtcattgttggcccctttgcctgcagtgactctgggctgggggccagaagatggagtgaacccagcagtcagaagtccctgagggaccccaaccctgaacatgaacctgaacccactctggacacagtggatacaatagcactgtccctctgtggtggactggctgacagccgggacatctccctaggtatgttcgaccatggccaagcccttttgagggctggtgctgagcccagaggatggggagggcagggaagactgtgagggtggggcagtagaggtgagaggctgggcttccctgcagctctctgccctgtgcagtccacactccgccagcaggggctggaccttcccaagtccccatgaagcaaaatgcttgacgctaagttgtgagttatcctgtgaatcctggggtgggaacaggtgtaaaaaccacaggtagggaggagcactgccaggttacaaagccaaccgacaggaggtgagcagcagagtggggagcaccagggggctggggcagcgggtcacatgggatgtgccagcctcacccctcactctgcctctgtgcccagagaaattcaaccagcacagcgtctcttaccaggacctcaccaaaaaccccggacttttggatgacccaaacctagtggtgaaaatcaatggaaagtaagtcccagagctggggctgctggcagccggagagtcatttccctcttcacaaccctgcagctgctgcagcttgatgccctgttctgtctctctaggcattataactgggctgtggctgcccccatgatcctctccctgcaagccttccagaaaaacttgcccaaggtaatggttagagcaccactgcccctgctggggaaggtagccatagactcagggcacggagacccttagcaaggaagtgaagggtgagcagagatgggcctgggagccaggggctagctggctgcaagactcactctgggagaggcgacacacgtccctgaagccttgcctcacccttccctggtttcctggccgtggctgaatcctgttgtatttaaacttgacttcagaggagctcaggacaaaccagaggggaagaaaaatccaacagatgcttaaacaaggacatgtctttagcaggaggcctttgcatctgaaatatggggaagcctttggatctgaaatacggggtttgggaaatggaagttgcacccttcaccttgcctgaagactattcctccaggctgggctgaagggtgcttactttctttatctgcacacatttcttgagtacctactatgtcccaggcctaggctggggacagtcatgaataaacgaaacaaaattatccctgctctcaaaggaagacgaagttaaccaaagactcatccagatgaatataattcagtcctgagcactgggaaggatgggtgtgcagtgcttgcagagcctatggcaagggggtttgataagcaagtgcccgctgtgcagagattgaaggatgggtgggccttgagctggccaggggtggggaacagcatgtatgatgcccagagggggaaaggaatgagggtatgcctagcctctttactcttcccagaacctcttccctggtcttcccagccaccttcccctactcatggaggatggtgccctcctgggcagtgccagcctgtgccaacctgcacctgcccctctgggagcaatccaaggcaccacactgacctggcatggcctattgttcttggcttgcccaaagagcatcactaacagatgttgacagctgtcactgccattgggtgacagctttgtcctctggctggtacagggtctgaggtaggacccagagtctgtgggaaggaagagggtcccttccctgcttggatctcctcaccttacccagacagacccaccgcttgaggcccctgagagacccctaccccaccagcctgttcccagctcaagggggccccctggctattcccagcccaagcccacatcctcctgacttgggtctgtaggatgctggtgtgtcccccagatgggacttggcctggcctctccctggggttatctataatagcatagatctaatcagcattttttcacaaggtcaacttgcccccaaccagacagttatggtaacatacagaaaagggggttgttcatggaataggatcaccaaccttaggaggttgcctggggcagtcttggaggttgaggggagtaccagctaaagattgttctccctgctgccacttggtcacagcatagggagtaccagatcttgagaaactcccaaagcattgcttttaactactctagtaaaggaatggatccacaagatttggaggccaggctgaggctgggttagagctagggaccggggctgggggcaggaatagcccttggtcttttgagtatagctcacccaagtcattgcttggaatcccaggatggaggtgagcacacttccttggcctccagatgttgacagcaccttaccctagggttggctcagactctgggctcatgcgtggagggtcccaagaacaacgtaaggtaggaggtttatgtggtgcaggaaacactgccatggctttcatctgcccacagagcaccatggacaagctggagagggagaagatgccccggaagggtgggcgatggtggttttcctggcgacgcagggacttcctggccgaggaggtgggtggtcacagtcgagggccagggccagggccagcacagggcgggaggtgggattcactaatggatgttctttccacagcgcagtgcccagaaggagaagactgcagccaaggagcagcaggggtgagtgagaccccctattggggctctgcagggggagcctgggaaagatggccctgggtgcaggtgggtggcagggaggagccagcaccctgtctccagctgtgggtttttttttttgtcattcctcaagcaccaagcacttctttttttgttgtttttgtttgtttttgagacagagtctggctctgtcacccaggctggagtgcagtggtacgatcttggctcactgcaacctccacctcccgggttcaagcgattttcctgcctcagcctcctgagtagctgggattacaggtgcccgccaccacacctggctacttttgtatttttagtgagacagggtttcaccctgttggtcaggctggtcttgaacttctgacctcaggtgatctgcccaccttggcatcccagagtgttgggattacaggcgtgagccaccgcaagcacttctataccttttctttctcctgagaaatggccccattttacagatgggaaaaatgaggcctagagacacatttcctggccaacaaccaggaaatggcagagctgacacaggtcctcaggctcctgccccagacaaggggatccctattaaggaggggcagggcctctcgcagcccaaataagccagctgactttgtttcttttccacatctgaagtgacccagctgcctaaggctgggtggagagtagctaaggatggcctgactgaaaccaaagcaggtggggttgggaataagcccagagatacactttaggtatttcaggtaaatatctccaaggcagacactgagggctggcaaccctgggtctcggcaccctctgctgtcacttggctgggtggagactgccagcctgcacccctgtgtctgccaccactccaaatgggttgcacctagagggagggatcactgataccctgggtaggccctggcatggcggggacaggtccagcctcctcttggcatctcccgggagtgaaggccctttggctggaggagatggcctgagagccagtgtggtccacagggagaagacagaagtcctgagcagtgatgacgatgccccagacagccctgtgatcctggagatcccctccttgccaccctccactccaccctccactcctacctacaagaagtccctccgcctctcctccgatcagatcgtaagtgtgggttgtctgtgtggaggttggggaggggctgagctaattctgtcttagagtccctcaggacctggctgagaaatggctccagggagccacatgttcaccaaaggccagaatctatccccttgggagcctccctgatggcctccacttgaatacctccaagggcagggcgctcacttctcatgacagcccatttgtctgtcagacaccgggaaagctgtctcttaggtcctcctaagatatcaacctgtagtgagccagcaggctctaggtcagcccttggaagcaacactaaaaagaatcaaatgctaatgacagcccctcagattctggcaacccttggccccaagtcacctcttctctaagctcagtaactggtggctcctggaataagaacatattttcttcatggttgtggctccatggtcagggaagtgtccaggaggggctgaccagccagtacaaagcagctgccatctgtctggtaccctggagctcacactcaactcagggctttggtgggaagcggccctgatccttccctatggatcaagtacagggttaggcctctccttaggacaatgttgactcaggtaccctggccccaaggaggggcttcctatggagatccccacaggacccccatctatggaggggggtgttttcctgccaacagcagtcccagccttggggctggcctgggaatcctgggcagggagtcatggatgcggctttgtgggttacatctcaaaggggagtgaagggaggctagggctcctgtggcctgcactggacagggccctgatcagcatggccaccctctgcccacatggatgtgtctgtgcatggctatctctgatgaatccaagaagcatctctgagctgggaggaagaggagaatgagaggcccgaggggatcggaggccacggcgtaaggggagaggtaggcagtgcctggctgtcatcaatcacgacacacccccctttgtctggcctcagcggcgcctgaacctgcaagaaggtgccaatgatgtggtcttcagcgtgaccactcagtaccagggcacctgccgctgcaaggccaccatctacctgtggaaatgggacgacaaggtggtcatctctgacatcgacggcaccatcaccaagtgaggcccacccagctgtgggaaggggagggagaggggttgtggactcgcctccctctgtgctgggtgtggtggggagtgagaggagccctcccttcctggtgggccatcctggggctggagctgggccacgtggagctgccttggagtaacccttcctctctcactctaggtcagatgctctgggccatatcctgccccagctggggaaagactggacacaccagggcatcaccagtctctatcacaaaatccaactgtgagtgcctgggctggggctggggctgaggcgaggcccccagctctagagagggagtgacaggacaggacatcttggggaccagcagggcccacaaggcaggctgccagggcaggtgcctggagtgctgagacctctctattggcccgcagttctgggaaaggctcatcccctggggctgtgttctaggatcagggcccacctactggcctgcagccggaggggaggccctctccatcctggtccacccaggcctcaggactctgtgcaccgtccagctgagtccactgcctggccgttctcttcaagtcccctccctgcaaaggttggaacatcagagtcccacagttgggctgggcaggctaaagccagagaaacagatgggggctggctggtctctgatggctctatgccaccctgtcccccactctcagaaatgggtacaagttcctgtactgctcggcgcgggccattggcatggcggacctcaccaaggggtacctgcagtgggtgagcgaggggggctgtagcctccccaagggccccatccttctgtctcccagcagcctcttctctgccctccacaggtaaccacccctacacatacaagcccgtggccccctggtggggaaaggcaggcccactgccaggccagccttagcaggctggcattaagctctcaggtggcaaggagggtggggtcagaccccccatcacctgagcctgccatcccctctggcttcttccctactttggcccccttccctgctgtggttctggccaccccagagaggtgatcgagaagaaaccagaggtgttcaaggtcgcctgcctgagtgacatccagcagctgtttctgccccacggacagcccttctatgctgcctttgggaataggcccaatgtgagtgtgtcccctccactctgctgagccacctctccccagctgcctgcaggcctccattccatgggcccctcctgtctcccacaggatgtctttgcctaccggcaggtgggcctgcctgagtcacgcatcttcacagtcaacccccggggagagctcatccaggagctcataaagaaccacaaatccacgtgaggctaaaccctgccatgttccccatgccctaccacgtccccctgccctggcttctccctgggccccaattttacctcttaccggggagtctgtcccttactctgggacagacccatggccaaggccatcgtttggtggcagctcaggctcagtgctggcccccttctgcctgtaggtatgagcggcttggtgaagtggtcgagctcctcttcccacctgtggcccgtggccccagcacagacctggccaaccctgaatacagtaacttctgctactggcgggagccactgcctgctgtggaccttgataccctggactgaacctgccctggctggctcctcctccctggcccggcccaggactggctaggtgtcctggggtataggagggtgggaattggagtgtcatggggcaaacccactgaaggggaaggaggaggctgcaggttggttggcagctagagagactcccccatcttccccgtcatatttttgccagctaagctgcagctgctccaggcgtcagtgtggcactgtcctggggcaattagcttgtcatctgggcccttgcagggttctttttttttttttttttttttttttcctgagacagggtcttgttctgttgcccaggctggagtgcagtggcatgatctctcggctcactgcaacctccgcctcccgggttcaagcgattcacctgcctcagcctcccaagtagctgggattacaggcgtgtaccaccacgcctggctaattttcgtgtttttagtagagatgggttttcaccacattggccaggctggtctcgaactcctgacctcaagtgatttgcccacctcggcctcccaaagtgctgggattacaggcatgagctaccatgccaggcctccttgcagggttttctatgcccttgatatctgtctccctgtcaacctgggaccttgctgtaagtcttgataggacagggagaagagggaggccctaccgaggctcgaggcttcagtgaagggtgacagcagtgggagtgtggtacagcctctggaaggacacagtgttctccccgccccttgtctgggagccaggactgtaccctccgaagccagacatcactgccaacatatcccccttgctggtgccctggcatctcagcacatgacacacacccacacctgcaggctgtggttccggcttggcctgctccccgtccggctgctgccgctgcctctctccagacctcgcttaaggacagtcccaaactcagctggggcaggtgttggcctgaaagtcctcccccagcctctgctggccagcttggtgctcacagctgctgggtaagctcttgcctaaggagctgtgggaagcagggctgatgccccagcaacctctcctcccactgtctttgaagaaagtagctttagaccggctaaaagctttaatccagagcctgccctactctgatagtaccagagtggagggcagaataccaaatgtccaggaaccaaaggcagggctgtggggacctgaagagcagcacagtggggcccgtgctgctgtgggggaaactgaggctgggagcctcagcagagaccggtgtcaagagtctctgggaactgcataggcctgaggaacatgcattttcaagttgtccattgatggtttcgtacctgaatttctcaccttttgtgaacatcttgggagggtgggggttttgcaggggtgttaaaagcaaggcttggagcccctttcctccagctggtggctccttctcagggcctggcctcattcaggccactttgtagagaaatgccctgacctcgcaggaaggatttccccacccccaagtggaaggaagaggacagtgtgggcaccagagggccctggaaacatcttaggggaaggaaaggaaaaggataaatttggagtggggggtctctaaacagattgcctggattccgttctttcctggggttctacagctgcctaagccctcaccttgggggaggatcaaagggaataaagagaactcttggctgagtctttgtgcttctgttctgtcctgaaggacacgtgaggagccagaaacatctggcagcctctggtccttagttcagatacaacatccatgaagctgccaggtgtgaggagagttccagtgggcatcaccttcctgcacaaacctagtcctgatggctgcgaagagaagccgaggggacaaggaacagaagccaccaagggctgtggactgttgcttgtgggcacagggcaatgcggacaggccactggctgtgggcctgtaggtctctgcacagttgctgaggctggtgctgactgcctgcagggtcctctcaaggccttacatacggacactgatcaaggccagtttgccacagcagctgcccctgccagccatgctcaggccctgcagctggctgtccagacactgatttgctgacagtggaatgtgaactctctcaagtctaccctggccttcaagcatgacatccttgccttgaccgctgtccggaactgtccagtttctgcagcactgtgcatgggttttggtggctgggacagccacgtggaggattccctcagtggcctccttagtgccatttgggctagccagggaaggctggaaggcgctgctggataaggctgggctctggggtgatgttccccgagttggtgggatctaggggttgggtcctggccagcctgtctagttggcttgccctggccgcacctgctcagccagctgggcctggcagtccagtaggtcatcccggaggcgggcaatgtcctgcgtgtgctgggccagcgtacgattcagctggtccacatggctccacaggccctctctgggcctcagtggctcagtgggcaagctgtccaggcccgcggccagcaggcccagcctcctgcacgcaccctccacttgtgccacccgctggtcaaagtgtcccactgtgtgctgaagtttctgggctgtgtcctggcagcggctcagcccactggccaccttggccacaccagccttgagttgctccagctccccacgcaggttcaggacctgcctgtggccagcctgaagcctggagccttggctgctgacctgctcctggatggcctggacttcggcttccaccttgcgttcccgctcatccagggacgtgttggcagccaagaaggcatcagagtactggctgacagagtcactgaggcctgtgagcgacttgctcactgagttcagattgaccttgagcagagtgatctcgccttgaagtgagctgcccgtcccttctgccagctgtccctggacctcggccacagtgccattgagctgctggagcagtgctgcgtggctggccacctggcgtaggagggcctcgctccggctctgccaggccttcacctctgccacgaggctgtccaggatggctgaggtggtgctcggggtgcacgaagtctccagtgagaccaaccgttgctctagcacagccagctctgtctgtacaaggggccgagctgacctgcccggagaggcgctgtcatggcttagctccccagccaatgttgctaggcgctcctcgaggctctgcacgcgctcttccagcatggtcccaaagccgcccactccccacccccccatgtccaacctcagacagcatccccttgctccaccctctgtcccattgagcgtctccagaccctcaagcagcccgtccacacctccctcgagcatggcagcagagagcctcgtaagctcatccccggccggggcaccggggcccctttgggtctcggtgactgcctgcagggccctctcaaggccatccatacgggcattgatcaaggctagttgcccacagcagctgcccctgccagacacgctcaggccctgcagctggctgcccagctgtgacagctcctggcgcagggccagctcccggccatcaaggctctggtgcagcctccggctggcggcctgaccctcctcacattgccgccgtacctcctgcacccgcaggtcacactcactctggacgccttgcagcttctgctcaaagccatccagcaggctcccccagagtcggtgcagccgtcggtccacgtactcctccagcagggccagggaggtgagcggggatggtggggcttcccgcagccgctgcaggtgggcctcatggccaagtgccagcccatgcaccttgtctagaagctgcaccttggtctgaagagtgttgctcacctctgtcaccttgcttaggatctcgtctaagggaggtgttagtggccctctggctctgtctcctgggcccacaagcccctcagggatgaccccaaagcccacagggacagcaggagccctggggccaccagtcatcctgttgggatcctcgtggctagccaccaggccactgagggtaccatatgtttgagccaggcgctggacatcaccctccaggcgttccagccgctcaccaaacagccctgggcctttccttcctgggaaagagaagagagccccaggggcatcactggcctcaccctctcagcttgtcacaatgccaggccacccaagagactttctgttctttttttttttttttgagacagagtcttgctcagtcgcccaggctggagtgcagtggtgtgctcttggctcactgcaagctccgccttccgggttcatgccattctcctgcctcagcctcccaagcagctgggactacaggcacccaccaccacgcccggctattttttttctatctttagtagagatggggtttcacgatgttagccaggatggtctcgatctcctaacctcgtgatccacccgcctcggcctcccaaagtgctgggattacaggcatgagccaccgcgcccagcccagactttctgttctaagcctaccttctcactgggcataactccctcagctttatggtggggtgaaagtggggcttggggcttgcccctccccatccatgccggagctcagccagcctgggatcagtcccctccctgcccctgccactgagcccaagaaacccaatcaccttggagggtctccttgggcagactcaccatgagggctgggggctgctctgctgtaggaagggggcctggggcctgggtccagctgccctgaaggaatctgaggctcaggctccagctggggtgaggcagccccatggtccgtgaggtgctcagggcagcgtttcccagtgaagccgggacagcaacgccaggcgaggtctgtcactgtcttgtagccaaccttgtatttgggtctgagtactgtgcggtacctgggccagggagggcaagagagtgggatcctgcacctgagggctgtgcttctccccctagctggcactcagggccgccctcagacacttgcataaggctgggtatctccccacctccatagcacccccagggctgtactttttctgtgcttaaggtgacaggggtgggtaagggcaggccttcctgaagctcacagtcatgttagggaaggatgcaggtagaagtcccacccatcctggtagcttggagagaagcaggaattttgccccatccctcccaagaccacttggaccccctctagctcaggctgccatgagaaattccactcaggctgcagtagcacctgggagaatcagacacagccccagccctccctgtgggcagggaggggcactgccctggagctggcgctggcagccccctcactgccctgggggccactcttggctcctacctgctccccttagttctttccactcctctctagcctgctccgggacctcggctctggtcagagaggcagatggacgggtacctctgattgtgagcagggaagggaaggtccagggtacaggcaggctcgcgagggtccatgccctcactgttcagccacgtacctgttcacccactgacacaccggagacaacaggtttgtttccacacacacacgtgaacctctccaggtacagagctgtgcatcccatgtgcgtgcagccctgctgctccggcttcctctccctgccccatggcctgcctccttgtggtcaccacagtcctccctgggcctgccaggcccccctgtggcatcacccgttgcctaaggggccctctgctccctcctctcccctcaccttctgcctctgtcacttcctcctagccttgtgctgcctctgcccccagaaccttccccttgtccctctgtggttcctgggctccaacccaagcctgcccctgtctgtgcgggtgatgctctgctgcaagcccaaatccctggggtcctccttggcaccctcttttctggggccgccttctactctggcctgtatgggggctcaggtgggctctctggagtccaagaagccccttgtggagttggcagctgctctcagctgaaggcaggactggcgcttgtgccaggggattccaagtgtgtaggtgaggagtgcacttacgtgactgtcccggggcacttgggcccccatctacactgccggtattcagcctttacgtagctctccgctccctcctgtaggatgcaggtcacattcctgtgcaccacataggcacagagggccctacaggagaaaatggcacccctggaatatctggctgagcgaggcccacagaggcgcctaccctcccacctccatctgtgggcctcagcaggactccaaactcccatgtctcttctgtctgttctctgtgtccctgggagccaacgcccttggtctggggtccagccccgctgctggtctctgattccagcctccgtgatgggtggcccctgggctaagcactatttggaaccaggagcctgatgtggctgcccctccctgcgtggggaagaggccagcccggattctccctcaagtgccctgccacacccccccatccttcgctgattccaaactccttatcttggcatttaaggcttccgagtccccactcagtgactcctttgagagcaccatgtcttgtccttcctccctgcctggctcccggggaaatccacctctcctcgtagttttgcagcccctgcctttggtcctgttcccttactctcagagcagttcttgtaccacctcctccaggaggctcgctgtgatgtacccaggcccactgagtgtcggtactcttcctcctacaacagctctcaaattcagctagaattcaagttcagccagcaccccaggcagagcctccagcccacttaactgaggccagttcgcaagccactgcccacgaaacaccagaagctgaggcggggaaagcaggctccttgatgagccacaagggctgaggaggtggctgcctggcataagccgaccgctgtggacggctgtgccacagcacaggcccggagccaggagcccgctctggctctgcagcccggccacgctggggctcccatggggttgctggggccaggctgactgcgagagggcagcggccgcccggatgcgcagctctatctcctacctggccgggccaggggagagaagggaggcccggggcgggggagccccgcgtgctcagcgcgcggaccgcctttcctcctctccctccacctggtccgctcgcccggagtctgcacacagcgcagctggaaaatgttacttcgctggaaaggtttccgctggcactgccaggatcccaagccgccgcgccaggccccctcggttcctttttcctcgccagccccgcaacctcccggagcgtagggcgctcgcctgggcaggggctcggccccgggcgccgccccctctgtgcagcggcctcggggtgcccggggcctcgacgccccccgcgggtgcgggcaggtgggagcggcgacgcgcgcgggcccatccctccctcttcccgcccgccgcccgcccgcgcttacttgtgcggccccgggcgcagccgcgggcgccatcccgtcgtgtagagactgtagcgggaggcaccgggcggcgcaggccgcgccaggagcggggtgcccctggcctgcgcccccgagagcagcgccgcgacggcgcacagccagacgagcaggcggcggcggcccatagcggcccccgcgcctctgcccggccccgcgcggtgccccccgccgggtgtccgcctgcagcgccgcgccgcccccgccgctggtcggcccgggtcccgccccgagggtcccggggtccccttcggcccccgagctcgctggcccggccgcctggcgcttcgcggcggctgcgtcccgcggagtggccggcgctgctagcggctggggccgcggaggggaggcgggaggcgggctctttgcggattagcataaacttggggccgcgccgctcgccgccgccagcccctcgccccagctccgagcggacggccgaggagccgcctgcgaacaggaggttccaaagggagcagccccaggtggcaggggcgcaggccgccgcgccctgggaggccccccgagcacaccagccactctgtcgcctgcgggcacggggcgagacgcagagaagcggacccctgaggccagcctgggcgtggactttccaggagtcgtccaccctcaggatacgcttgtcttcagagtccgtgtgaacccgggaactgctctccagggctctggagccgagatggccgtgactgggggcacagcagcaccacctcccccgccacctctttggaatagaccccagatcatccccgtttgctcgctctgcctcctggccccatcattgcccgggaaccttagtttgataactccgctgacctctccccaggcatcccacctcccccttaccccgcaacctctgccacgtagcctggtggcccggttgcacctctggttctctggaggcgcctgtgttgcctctctgtcttaggtatgggttgcaccgagcccgaaaggcctatcaccgccccagcccagccaaaagtgctgtgcttttcgtgcaactgaagctctaagccggctggtcagagaaaatcctcaggtctttctcacaaggcactgccgcggtgaagccaggcgtcgtccacattttgcttgtgaagttgactcttggaacccaagagttgggttttatcgtcgtcctcattcagtatcaccttgctaactctctaacctgcacagagtccttctgattctgtcatcagagcggtactttcctggccttgtctcatccacaccggtggctacagccgtctgtgtctttgccccaggagctgataggtgtacagaactctggggcttgcttggagagacctccctccaaattgaccttgagatatgaattaatgccttttggatagggtgatggttatcaaggatactggaaggggcagctccgaaacccacatctatttcctgcccttagctttagtggcttttgggttctgtggggcggacatctgaccccagctaggcccatcctgctttcccccaggctttggaatcagaacacagaagctgaaggaatccagcttccaggtgtaggttgtgtgagtttctcagggctgtggtaacagccacagactcagtggcttaacacacagaaatgtattcttgcacatttctggaggctaactccaaaatccatgggccagcagggcaatgccccctccagtggctctggggagaagccttccttgcctcttccagccactggtggttcctggcaatctctggcgttctttggtcaaggattctttgtagcagcatcactccagcctctactttccctccgcatatccctcttcaggtgacctttttttctctgtgactgtgatctgtgtcctttcctcttctttctgtttttgttttttgagccagagtctcgctctgtcgcccaggctggagtgcagtggcgcgatctcggctcactgcaagctctgcctcccgggttcacgccattctcctgcctcagcctcccgagtggctgggactacaggcgcccgccataatgcccagctaatttttttgtattttttttttttttttagtagagacgtggtttcaccgtgttagccaggatggtctcgatctcctgatctcgtgatccgtccgcctcggcctcccaaagtgctaggattacaggcgtgagccaccgcgccctgcctttctggttgtgtttttaaatttgagacagggctgggcgcgatggctcatgcctgtaatcccagcactttgggaggccgaggtggggggatcacctgaggtcaggagtttgagaccagcctggccaatatggtgaaaccccatctctactaaaaataaaaaaattagccgggcgtggtggcgggcgcctgtaatcccagctacctgggaggctgaggcaagagaatcacttgaaccctggaggtggaggttgcaatgagccgagatcatgccattgcactccagcctgggtgacaagagcgaaactccatctccataaataaataaataaatagagacaaggtctagctccatcacccaggctggaatgcagcgtcgacctcctgagctcaagtgatcctcctgcccccacctcctctgtagctgggaccacagttgtgcaccaccatgcacagctcatttttaaaatttctgtagagatgggctctcactttgttgcccaagctggtcacaaactcctgagctcaagtgatgctctcacctcagtctcccaaattgctaggattctaggcgtgagccactgcacccagcccagcctcctcttcttataaggacaccagtcattggatgtacagcccaacataacctcatctcaaatgattacgtctacaaagaccctatttccaaataaggtcacattctgaggttccaaatgttcatgaattttgggaggggcacaattcaatccactacaggggcacttggctggtaatgataggagagaccacgagagctctgggggaatcatgggaaagggagaaagagtgtggtcaggggagagaggggcagagtcaggggctatgtggtgagtaaccatctggggacaagctgtgacttccctatctgcttccagtagtccaccattggagctagcttgaatgggtttctgatcccagcaaccaaatgtgctctacagagagaaacttctctagtcatgaactgtagaaatgatccctgaaagtatagtcttacagcaaccacatggtccctaagacagcctttcactctccctataaaagcaccgaatgtgctattatatgctccaacctctaagagagatgttatgaaccattttgctgagggcaagatacaccatatccccaacaagctcttgatcttgtaaccactgactttgcgctttttaggaagtgagaaacatctgagccagctcctcatcctaggctgggtgctgactgcctggcagcattgcccagcctggctctgggaggaactcccccaccccagaggctgtgatctttttccaagtggtcccaccccttcctctcactcccttccccagccccagatgtggggcccaaaactcacaaggaagaggctggaccctgtttgagcttggaaatatccacgtcataggggctaaaaggatagctggaccccacttccccctttcccaggtggctgacatcaaacaccatgctccctctttcactgcaacagttttgggatccaggatctgggccccattctagtgggggtggaggacctcagtacagggagatgctcagggtcttggctggatcaggccagagcgggggtccccccatagacgatgaggccactttgcatctgccagacaggaaacctagggaggccagaagcagaggaggaaaggaggcagtcatgttcctctgactcagactggagtttctacacctggatggaaacgggccatacacgggagtgggagtgcagtttcagttcacagggacatgcacaaccacacccaacccatcccccataccactatcatgcatgtgcatgagtttttcctttcgtacagatggggtctcactatgctgcctaggctagtctcagactcctggcctcaagtgatcctcctgctttggcctcccaaagtattgggactgcaggggtgagccctatgcatcctgcctttcttttctgttcttttcttttttttcttttctttttttttttttacggagtctcactctgttgcccaggctggagtgcagtggcgtgatctcggctcactgcaacctctgcctcccaggttcaagcaattctcctgactcagcctcccaagcagctgggattacaggcacatgccaccacgcctggctaattttttgtatttcttttttttttttttagtagagacagggtttcgccatgttagccaggctggtctcaaatgatccgcccaccttggcctcctaaagtgctgggattacaggcatgagccaccacatctggcctttccttttcttattgagggcccagcacataagagtattaaaaaccacacaaagttgtatgggatgcagttcccctaaaagagacagaaatagaaagcactgaagctgctggctttctggtacaagctcttcctgctgcagatggacccctcctgcacagggaccacagcccttgaaggcaccagccctaaggtgcagccctttgtccctgaccatctcccttaccctctttttttttcttttttgagagtgcacagctaggcctccctgcccacagagccacatttggaagttctgtgcagcaaggctctttgcccaggctcacttttttctccacatcatcaccatcagcattttgattatatctgcaccatcataaaaggttataccaaatgcacatgagtttctgaggcaggggtttgcactgaccccatccagctaggcagaagcagggctcgtccaggatcctaggggggatagatgtgcagcctggaggcaaggtcctggaagagtccagaaatcgtggaaactgggctctgtaaagcctggacggacttccattgagtgagagtagcttaggaacagcttagaaattgtgactgctgatggactgtcaacatggacatatgcaaaccagatgcaacattacgcaaattatatacaaaatacatgcacaggtctcccaactattgcaaatgccagatatggtccttgaggaccctaagtttagctgagacctgttgtggggcagagagatcaccctggacttgccagtttctttttttttttttgagactgagtctcactctgttgcccaggctggagtgcagtggcgtgatcttggctcactgcaacctccgactcccaggttcaagtcattctcgtgcctcagcctctggagtagctggcactacaagcgtgagccaccacgcccagctaatttttgtattttcagtagagatggggtttcaccatgttggccaggccggtcttgaactcttgacctcaagtgatccacctgccttggcctcccaaagtgctgggattacaggcatgagccactgcacctagctaggacttgccagttttcttatggtgggcaggaagggctttgctccaaggtggttcacacactgtggggaagaaatcaggcaaggagtcaattagactcaggtttgaatcccagctcttccactcacaagttgcatgacctcccttgagtcacttcacccctctgagcctctgctttcctatacgaaaatgattattatgaggaatagatgagaactttggccaaggctcccatgtgcacagtcgtgcacataacagacgcccagtgagtgtggcagggctctgcacagagtcctttcttgggggttggatatctgggcctcctttctagtcactgcagtagcagctgtgccccctcaggctgtgggcaggaccttcttgcaaagcagcacatgcagctctgggtttggaaaatgtcagtgcttggatggaccaggaatccatgtacctctcactcgtcaagaaatctggcagaggtcacactcaacaggggtgctgtgggtaccccagccagactccctttccctggtcagtgtacccatgaatcccctggctgcaggtgtgattactgggaatgctcccagctgccccttctgtgaattgcccttggctgaggagtgactggctgatagggtgaaatggtttggctgtgtccccacccaaatctcatcttgaattgtaactctcacaattcccatgtgtcgtgggaggaacctggtgggaggtgattggattatgggggcaggtctttcctgcactgttctcatgatagtgattcagtctcacaagatctgatggttttaaaaaggggagtttccctgcacaagcgctcttttcttgtctgccgccatgtgagatgtgcctttcaccttccaccatgattgtgaggcctccccagccacgtagctgtaagtccaataaacctctttcttttgtaaactgcccagtctagaatatgtctttatcagcagtgtgaaaatggactaatatacagggggacaaaaaaggcagcctcctcgcctcatggtggacagcccagtgttagtttatgttgcagagcccccttggtcaggcccctctagactctacctgggatccattcttgctctatttccatcctctcctgttttcctacctcccttatgtatctctcccaggagcccccttgataaatgacttataactagatccctgtctcaggatctgcttttgtggaacccaacccaagagagggggacagacctgcatgcagagggggacatgaacttgtatagtcaggaaccatagggtagcgtgggctcacagaggaagaagtgcctgggtgcctgagcttgggggaagggatcagagggtgtttcacaaaacaggcaacactagagttcaccgcacggggagaaagcaccgtgggtggtgggtgcggcatgtgcatggcctggaggcaggagagagcctggtatgtatggggaaccccgcagagctctgggtagcccaggctccaagagaggttggcaggggccagacaagaggggccttgaataccccagtgaaaagtctggactttacagctggaaacgatgcatgcagaactgtcgggaaaaacatcctgtggctgcagctgtgtggagcagacacacgaggtggggtgccggtggggtggccctggcagctgtcagccaccaggctaacagggaccgagggatgaggaacagggctagattctagaggctttcaggacaaaggactaaaaggccttggtggctaatctggggctctgggtgtgggaaggagtctagaaggtaccacaaagagaggagacaaaacatcagggctgaggcagggttgaatgagctgtacagggcaggggtctgcattccctgtgcccaccacagctagagccaggctgagcctccagttggaaggtccggacactgaccagagtatgtggcacagctggcctgaccccagtaaggacctggggctgccccttgctggaggggctggcctccaggcctgattaggacagggatggggagaggctgggggcgggggagtagagtgcagagctgctcaggcattgatgcgggggtgtggttgcaaggccctgggaagggctcaccatcagctctcctctaactcttctattcatggacaccagagtaaaaactacacaagattacccactggtgatgggggaggcaggcttgcaatgcagggtgtgtgcagagaggccaaaacaagcaggggagggggctaccctccatggggggaaggaaggggagggtgttgccatggaagactcatgcttggacaggcagaacctgaccttcacccagacactgtccttatctcagacctgctctgccttaattccttaatttgctgggacatttgctgggcacccggtgctggaagcacagacaggtcggctccaggctctgtgctcaaggcatccagaggggcagaggtggatgagagttagagaagccccaggaggggccagaaaggggcctggggaggtgagaggggaaagagcatccatggtgggagacacatgctccaatcagagggaggggacttaggaggggacatggcaggaggggagagggctgcgtgcaggctgaggacttgaggaggctgggggttgctgcattttgatgcttggccttcagccccttgaatccactccagaccacttcctagtgccactgccattgtctatttctgagtcgagctccaatccagactggcagtcctggatgcggggggccatctcttgcccaagtttgccagatgaatggaccgtgggtgttagatgggtcattctgtagccatgaggagatggcactaggcaggctggcactggcatccaggcaagagatgctggagatgagagagggtgggcattttggagagagagtcaccagccttcaatgagctggctggagaaggctcagggctaaggtcagggtcatgggccccaccctggtggggccccaggattctgtcttatgcttagggctagatgatatatctggcgtctattcaaaaggggtccctgccagggcctgaccttctgacacccctttcccctccagagcagcccagccttctccttttgcccgggtcccacccacctgcccttgccatgtgacctttgaggccttccccaggttgagtctttgcagccagggctcccacattcctggctatgctggtgttggccagcagccctagttcctttgggaaagagcggacaggaggctcccatggcggggactgtatcctttccttccctcccttgccccaggggctgcactgggattagggtatcttcctccctggccatatcaccacagtcccacctccagtcacagtctcccctcccctccctctccctccctctctccatcctcctcctgtttctctggcctcatgaagagccccatcatcccccagctgcccaccatggagtgggtggttggtagtgccagttaggtggcagtgcaggtgcctgagccagggtgaaggctggaaccatgttggtgaggatggaagggaccagctgaaagtatccaggcgatgaggccttttgacttttgaggggctccaggatgactacaggtttctggcatggggggtctcttttgctgagacaaggacagaggggtacaccagtctggagggaagccacactgaattggaggtgccttcaggtaccccgggggagaaggctgtctggagggcagcaggatatgcacactgttaaggtgtcccatttgttggctgcccctttgaagctgggggcagggcagggggccagagcatactgtagtgcaaggtcagaggcccaccctaccccactgctgtccagggctcctgttagagccacagggaagtcgctgactggctgtccttgtgacccctcctcccagatagctgatgaaggcacttggtcagaaggcacggctggctgaggccacagcccctctgctgccccgaggccatccttccctgttccacgggcctggcacttcccaggcggctgccgcaccactgaccacccttccagctttgggtccctcgtgggtttttcgtcctttcccccatccctagcctctcttctcaccatctccttcccagggaccctccctttctcctcccgcaaacctcattcttctccttttcccataatcaggaagagctttgattgcccattatacctggagcccaaattgtcagcaggagagaaacgggtttcccccaccttgagggcctgaccttagacactcaagtgtgccagccagggcagcattcctgggaagagaggggagacgtctaggttccaaccagacgagagtcaccctccccagaagaatgggccaaatgactcctaatacaagggaaaatagagacaaccccccaaaaaaagttttacaacaaaaccagctgaatgttcaaaacctgccccatctcatttctttgaaattggagagaatttaactcatcagcaaaaataaaggcaatgggaatgaagagatctccaaaggagtttgtaggccgggcacagtggctcacgcctgtaatcccagcactatgggaggccgaggcagttgaatcatttgaggtcaggagtttgagaccagcctggccaacatggtgaaagcctatctctactaaaaatacaaaaattagccagggatggtggtgcacacctgtaatcccagctactcaggaggctgaggcaggagaatcgcttgaacctgggaggcggaggttgcggtgagctgagatctttgcattgcaccctagcctgggcaacagagtgagactctgtctcaaaaaacaaacaaacaagcaaaggagtttgtgtggtgtaagaagaaaactggggacatttaaggcgaaaactaaggaaaatgattcagtgaaggagatcagaaagatgtggtcagaggagctggaggaggggggtggaagaggaggggagagagagagggagaaagatggcgggatggcggggggagacagagacacagagagagagagagagacaccagccaagataagagagcaagagagggaggagtttccaagagactcagagaagctataggtgaagagttggagttcacaacccagagggaaggtggtggtgccctcttcttggaccaagttgggtggaagcagggtggaggtgagggagtcatggagtggaggcagtgactgtggggagggggcaggaagaagtcgaaggcagctgaaggagaatgagtgagtccagggaagggtagggtgctgagctggaagagctgagatgtttctaggcaaaggggagggagccagagagaggaaagcaaggcccctagcaggcaggacccaggctggagggaagaggggcaggaggaggaggaggcggcagacaggctgggaggcagagtacctgcaggtgtggcgggggctgacggggtggcaggaagcagaaatgacctctgcttattggtctgaacgggaagtgaggttttctcctgagatctggagagaggatggaggaatatttagatgaggctgaggagaagtgaaggtttgaggacaggctagaccatagcctctgcggtggctgcaaggctctggtgactgccccttggccacagccccccagcagtttgagggtggggccaaaacgttgcctacaggggcctgtccagggctgtaagtgtggatctagggagggagagggaacctggtgggagtaaggattgctgctccccaaccagtttcctagggaaaaccaaatttagaatcaacagaaacatgactgggcttggtggctcatgcctgtaatcccagcactttgggaggctgaggcaagtggatcacttgaggccaggagttcaagaccagcctggccaacatggcaaaacctcgtctctaccaataaaatacaaaaaattagccaggcgtggtggcacgtgtctgtaatcccagctactcaggagttagaggcatgataattgcttgaacctgggaggcagaggttgcggtgagccgagatcgcaccactgcactccagcctgggtgacagagcaagagacagtcttgaaaaaacaaacaaacaaaaaaaatcaacagaaacctggcaggggcttcggaattgtaaaatgtgactatttgctttgtggcaatgtaaaaaaaaatcacattttcactggaaagaagaacaaaggaagaaaactgaatgtctgggaacaaattgatgctgacatttctctaccttgctggtgtccacctgcccacgtgcctggcttgtttatcgctgtgcttacaaatatttcctactctttacttcttgacatcttgaccaaggtaactgtgatgaggtaagacacagtctgttgtcattttccagcaagaactcacccaaggagttaagtgatggcccagagttttccagaatcactatcacctggcactacaatagaggcagagagcgaatgatactgtccaagacaggtgtctcttaccgtgtgaagataaatgctggttgatatcgcccattaggccgggtgtggtggctcacgcctgtaatcctagcactttgggaggccgaggcaggtggatcacctgagatcaggagtttgagacctgccttgccaacatggtgaaaccccgcctctactaaaaatacaaaaattagttgggcgtggtggtgcacacctgtagtcccagctactcaggaggctgaggcaggagaattgcttaacccgggaggcggaggttgcagtgagccgagattgcaccactgcacttcagcccaggagacagagcaagactccatctcaaaaaaaaattataggaaaagaaaccttttgatcaatgaagatgagtggtgatctttgcaaaagtgtacagattctaaatggaatgctggggaaaataaaaactgatacattacagggttttatatctgtcaatgtatccccagcttttaaaaaaggagtcattggaccctagtgttaggtccacagggattcaatatgttatggctccccttttgtgtggtgtgtgttcagaagtttccataattgaccagcctgtaatcccagcactttgggagactgaggcagaccgctcacttgaggtcaggagttcaagaccagcctggccaacatggtgaaaacctctctctatatatacatatacatacatatatatatgtaaaatatatattatatattatatatataatggttccgtaataaagtcttaaattttttcttaaagatggaacaattgacaatagacacctgtcattcttctttttcccttcttattttggaagctctgctagatgctgctgtccgcaagtactgaccttgccttttctgattttcattaaaaagaaactcatagcaacaaggtaccagttaattcctctcaccagagagctcttctccctgtttctcctccctcaggcaataggagatatgtaaaatgccttttcaggctccctttcccctcctcaatgcctaactttgccatcattcagcactttccctttagggaaattcttattgcatctctcttctgtttaaaaaaatatacttatttagcccttacattacaaattccatcctatcattatttattcggaggtaattgtacatgatttggtcagctcacggctcaccacaggttcctcttttcttcatctccttgtctccaatctgattcatctatttcctgattagattcctttctatggtatttcccccatatgggaaaattatgtggacctttgcatttcttctatcctaggaaggtgaatggcaacctggttggtttaggaggcttttctctgagtggtctgtggaggtgattcatattggtttctagcttgcaaataagatgtacgatttcagtctgattctcttctttctatgcaacttattttctcattagggaagcttgtctgaattttctctttaatcgtggaattcaggaaccttaccaggctatgcctagatgtgtgtcttttttccatcattcctgcctggaactcaatgagccttttaatctgcaaacccaagacgttcttcaaaccacggaaaattttctttctcatttaaaaatgattgcttctcttctatttcttcttttttctgagatttttattcttattttcatcattcacctattacaactcctggatctctctcctctgaggcgcttttagatttttactttgggttttgcattatctcttccacatggtttcctctcctccaagtcattttaaattgaaaacgatgtttcttcgttcaggaaagtatttgatttcacctttgactattttattttatttttgagatggagtttcgctcttccacccaggttggagtgcagtggcgtgatctcggctcactgcaacctctgccttccggtttcaagcgattctcctgcctcagcctcctgagtagctgggattacaggcgcccgccaccaggcccggctactttttttatttttagtagagacggggtttcactatgttggccaggttggtctcgaactccttgtgatccgcccgccttggctgcccaatgcctttgattttttaaaatgtgagcttatggttttgtttgcttttcctgttatgcaagttgtggttggtctcctcttgcagtgctgagtgaattgcaggctcttccttcctggccgctggattcccttaggtgccaactgtctttctgccttcttgcagccctaatcatctccaaggctcagatccagctgacaaattggctgcacctctctgtatcccaggagagagcgctctgctcattctgctgctctgcatccccgtctcccagcctcggggcagggagggattctgcagggcctcccaggaccacccaaagctgctggctctgctctcctctgtgcatccctgcgccaagttctctctttggagccttggagatcccattctcacccagggctctctctgctgcgggtccctactgtctgccccagagggagactaagtcctaagccagagctatcaagacaaaggccctgtccaaccgaccaggcctggctgctggctgacccaggagctctgctgtgggagcccattggatattggaaaggagggcagcagggcggtcaggctgccttcaccctggaggtttaattaaagagaagttcttgggtttcatgatattgaagagatgactgggatcaatcaaaagtttacttatacttgcaaaagtatatcagaaaaaaataaaaagcaaaatggaatggatttgaataaaatcagttttttttaaaatttactaggtctatgatgatgtatctagcatgcatagaaaattgagtgacattgaaggagttctgaggaattccgcacatttttttgttgtggtaattatagcattttgtgaggaaaagaataaaccttggctgggtgcggtggctcacgcctgtaatcccagcactttgggaggccgaggcgggcggatcatctgaggtcaggagttcaagaccagcctcaacatggagaaaccccgtctctactaaaaatacaaaattagccgggtgtgatggtgcatgcctgtaattccagctacttgggaggctgaggcaggagaattgcttgaacctgggaggtggaggttgcggtgagccgagatcgcgccattgcattccagtctgggcaacaagagtgaaactccgtctcaaaaaacaaacaaacaaacaaacaaacaaaaaacaaaaaccttaaatgctctcagttctctccttggcacaacaccatgtacccaccaaaagagttttccaaacctttggacgtgggtgaagatgaagtgtgcagggaacagggtgatttctttttttttttttcctttgagacggagtcttgctctgtcacccaggctggagtgcagtggagcgatctcggctcactgcaacctccgcctcccaggttcacgccattcttccgcctcagcctccccagtagctgggactacaagcgcccgccaccatgcccagctaattttttatatttttagtagagacgggctttcaccgtgttagccagaatggtctcgatctcctgacctcgtgatccacccgcctcagccgcccacagtgctgggattagaggcgtgagccaccgcgcccggccaatttcttgaaaacacattggactgggcgtcacggtccatcttcagctgccgatgaagaactttcagataccattagaccacaggaagttgtaacaaatgactcttcagctcttgcaggtgagcgaagtatacaattgctatcactgattccaaatttgattttatcttttgttttactttcttttaaccacatgataagtgtcccaggatttttttctaaagagcttcaaagtgaaactgtagacattttctttgcctttaaaagccaaaaaagatcaccatctgagagaaattatgagcctttcaaggccacctgggacagagtggagaaatgatgccaaaaaccaattcctaaggacttcaaagttgaaaaatgtttccttcagaagaaaagaactgctgagataaaacaaatgatggcaattccaattatgcatttttcctactttctcataagaaaagtattaaattaatgtctcttatgaaggatgggttcctagattacatttaaagttacagtttcatagaaataatcatattgaagtgaagcaaatttctgagcagtcccattcagttgaaataaaataatacacagaaatagtcaaacacgtgcaaaatgtgtgcagcctggaagcactctgaatcccacaattcagagtgtgttttatgaaactccaaaaggatcacttctgctacgattgtatcaacttaattgatcttggcagcctgatgatttgacactgtcttcactaccctgctccttagtctcagcgattacaatagcagtgcagaaagctcattttctactcttagtgacttagaaacccgcttctgctgctctgtccagtgacaggctctggccccaacagctgcagagtgagacaaatcacatcgaatgtttcctgagtctttccttttccaccctgatacggtttcttcacccaaatctcatcttgaattgtagctcccgggagggatgggattgggagggactgggtaggagacaactgaaacatgggggtgggttcccccatactgttcttgtggtagtgaataagtctcacgagacctgatagttttttgtttttttgagacagagtacactctattgcccaggctggagtgcaatggcgcaatcttggctcactacaatctctgcctcccaggttcaagcgattcttgggcctcagcttcccgagtagctggaaccataggcacgcaccaccatgcctggctaatttttgtgtttttaatagagatggggtgtcaccatgttggccaggctagtcttgaactcctggcctcgtgatctgcccgcctcggcctcccaaagtgctgagattacaggcatgagccactgcgcccagccaagatctgatggttttacaaggggaaacccctttctcttggttctcattctctctcttgcttgccaccatataagacatgccttttgccttctgccatgattatgaggcctccccagccacgtggaactgtgagtccattaaatctctttttcttattacctagtctcaggtatccctttgccagcagtgtgaaaagggactaatacacaccctgaattcattagttcattcagtcttcaagcaaccctgcaggaagaaatcactagtcccatttgctgtaggaggaaagtgggggtcagagatgttaagtgacctgcccaaggttgcaaagcaagtaagagtcaaacctagcctgattcccaagccggtgtaatcactgtgttcagtttgcagccaaagggatgaagatctgaggctcctgtgatatcatggatcatctatatttgctgagataaaaatgatgtgctactaatttaatctcatctgtaagaacttttctttcccagagttatgatgtcttttatcaggatggttagacatccacgtatggttccgaagctcctgctgaatagggcgggccatggaatgtctggtttgttgctgggatggcataaagggcatacactgaagtgaaatgctgacaaaccattcctctgttcttaaaaaaataaaaaatgtgcctggctaaacaaactgtggaatattaatataatggaatactactcagcgataaaaaggaacaaggtactgattcttgtagcaacatggatgaatcccaacagtcttacactgggcaaaataaaaagcctgacacaaaagggcacagagcaaatgactttatatgaaattctagaaaagacaaacttagtgtattattgtgctagggctaccatgacaaagtaccaaagacggggtggcttaaacagcagaaatttgtttcctcacagttctggaggccagaagcctctatcaaggtgttggcaggggtggtttcttcgtaggcccctctccttggcttgtaaatggtagttttctcccagtgtttccacgtggttgtccctctgtgtgtatctgtgtcctaatttcctcttcttataaagacaccaggcatattggattaggttccaccctaaggatctcattttaaggtaatcacctctttaaagacccaacctccaaatacagtcacattttgcagtactagggattaggactttaacatatggattttggaagaacacaattagcccacaacacctagactatggtgaaaataagcagaatagtggttgcctctgggaggagtgtgggttagggatatactaggaagtggtttgggagactttctggggttgatggaaaattggatttggtgatagggtttgggttataaaagttatctacatttgttgcccgggcgcgatggctcatgcctgtaatcccagccctctgggaggccgaggtgggtggatcacgaggtcaagagactgagaccatcctggccaacatggtgaaaccctgtctctactaaaaatacaaaaattagctgggcatggtggcacacacctgtagtcccagctactcggcaggctgaggcaggagaattgcttgaacccaggaaacagaggttgcagtgacctgagattgcaccactgcactccagcctggcgacagagcaagactccgtctcataaaaaaaaaaaagaagtatctacatttgtcaaactcactggaataaaacatgtagtccacatggtacatggaatagtacaatttatgcatttaattgtctgttaattttgcctcaaagaaaaccagaaacaaatattgaactctagttaataatatgcatgcctactgttaagggataaagtgtactgctgtctgcaaatagcttttgaattgatggctgggtctacagatggatagatatttgaaaatgcacatatagcaatctaccaacaattgcagaatttagatggtggattccctgtacaattattattattattattattattattatcattattattattattattattgagatggagtcttgctctgtcgcccaggctggagtgcagtggcgtgatctaggctcactacagcctctgcctcccaggttcaagggattcttctgcctcaggctcctgagtagctagaattacaggttcccaccaccatgcccggctaatttttgaatttttttagtagagacggggttttgccatgctggccaggctggtctcaaactcctggcctcaagtgatccacctgcctcggcctcccaaagtgttgggattacaggcttgagccactgcgcccagccctttcttttcttttctttctttttctttttcttttctctttttttttttttaagacagggtcttgctgtgttgcccagactggggggtagtgttgtgatctcagctcactgcaacctccatctcctgggctcaagcgatcctcccacctcagcctcaagaataactgggactataggcgtgtgccaccacacccagctcatttttgtattgttttataagagttgggtctcaccatgttgcagaggctggtcttgaactcctggactcaagcgatcggcctgcctcagcctcccaaagtgctgggattacaggcatgagccactgtgcctggcctcattgtataattctttcaacttttctgtatgtttgaaatttttcatcataaagtgttggggggggggataaaatttccatttgaaaatattagctagacatttctcataaaatctttcttcattgctagatcaaggttgccacgagactatgccaagtcaattgtccttgtgtcccccaccaatatgcccaggaagaaagagtagggagacaattccgaaagaggccttgagggtgctagggagttctagggactagctaaggcgtttgggctctgtgtttgaggaaactgaggctcaggctgttttgcgttgctgtttagaatccagggaagtccaggatgttttttcttaagccatgttggggtgcttaggctcagtggagaagcggggcatggccatatgaatgatatgcagttggcagcacatagtaggcacacaagtgtttgctgaatgaatatttacatgaaattggaaaggagccttccaaagatggagccagcaggagacagtgaagttgcctgtgcgggccgggggagtctgtctctgtctctgccccagcccacctctggcctggcctgagtaccttgagaagtgggcccaggagaggcccctggatccctgggttcctggacagccagggtgagggcgctttgccacattcttaggagagagcacatccaaaacaatttctttttctaaaaactcagtgctaacggattccagatgtccgtttgttatataatggggtttgttttaatagcgtcaacttccagatgtgcagcctggaatcaagaagcccattggccccctgaggacactgtgagccaagctgagagctgcccgggggagagacatggacgtgcagaaccagggatgggagaggagccagggtgccttcttgctgcccactgggctgctcacctgccctgcagctgtccccagactgaaagacaggaagggtgttcccgcttccttttttttcagtcctgactctgagcaggggctcccaggggacaatcatagacaggcagcttggggagggtctgctttggaatctggttcaagcaggcctagctggatgagcctggagaagtccttggcctccctgtctttgaatggaaaatagaataacgccattctacccagagaggtcattgtgcaaaatgaaatgaagtaagcagcacagcacggggctcagaaagccttgactttccctgagtggagagaacaggggcccaagtcaccgagcatcctcccctactcctctcagcaacacggatgcccctgggcagcacgggctgcattttccctggaacactggaaaagagccaaggtggggagctcaccacctcccccagtggcttgttccatggccctgcagctccaacggatagaacattcttccgttcactgagccaaaggcggcctctgtgtgacccccaactggtctgagttctgctctctggagctctgctgagcaggccacaccctctttcacctgataccctcgagtatgggaagacagagaccgagtctcccaacccttttcctagtaggcagctgcagttatgacatcagatggacgaagattaagatgctctaaggagagatgttcaaaatcccaaacaagaaaagtctcaacgtctgggggaatgattctgtggttctccctgtgtagatgttaataaaatctgtatgccttcactccaattcaaagagaaaagggccaggctcacgcctgtaatccccacaatgggaggccgaggaggatcacttgagcccaggagtttgagatcagcctgagcaacatagagagacctgtctctactaaaaataaaaaaattaaccaggggtggtggcatgtgtctgtggtcccagctaattgggaggctgaggtggcaggatcacttcagctcgggaggtcgaggctgcagtaagccatgattgtgccactgcactccaccctggatgaaagagcaagaccttgtctcaaaaggaaaaaaagaaaagtcacaaaatctgaatgcagtcacaggggtgaggtgtccacaaagagataaagtcatcatcttctccaaatgaatctatacacacaatgcccttccaacaaatttccaatcaaattggtgggggtagggagagggtgcaatataaagttgaacgttaagtgtagaatactcaccatgtctccgcagatgaaaaacattaaagcgggacttaccctctcagctgttaaaacacaggtaacactaaaatacattgaacattatggtacttgtgccggcgcagcagagagggaaatggcacagaaaatggaaacacgagcagtagacccatctccatatgagaatgtggaatgtggcaaagaaatgcatgtcacactaaagcaaataggaaatttcaacagtggttacctttggggagagggacttggcgtgggacagtagtgagtgagagggaagtgttcacttttcattttgtatcttttagagttgttttattttccaaccttatatatttttgtttgtttgtttgtttttgtttttgagacagagtcttgctttgttgcccaggctggagtgcagtggtgcaatcttggctcactgcaacctctgcctcctgggttcaagcgattctcctgcctcagcctccttagtagctgggactacaggcgcacaccaccatgcctggctaattttttgtatttttagtagagacggggtttcaccgtgttagccaggttggtctcgatctcatgaccttgtgatccgcctgcctcggcctcccaaagtgctgggattacaggtgtgagccacgtgccctgccatatgtattcttttttttaaaaaaagccaacatatatatatacctatatatacacacacgtatacatatatacacacatatacatatatatgcatatatatatatatatatattttttttttttttttttttttttttgagacagggtctcactctgttgcccaggctggagtgcagtggcgtgatctcagttcactgcaacctccttcacctgagaagccaacatgtttttatgccaaaatatgttccagaggttttgatcccttttgggttttctcttttgaatatttctgcacttaagagaaacctagtaagtgttataacacgaataataataggatctataacaaatgatgaacagttattgcctctacctcagggaggtaaaaggggagggcttttacttccttagccatacatttccacacttctcatccccctcctgctcgttcctcttcttttttctggatagcatgtataactttaaaaatcgaggagaggggggaattgaaaatttgaaaaaaaaaaaaaaaacagggcagaaatgatggattacttaagatgtgggactggacaactggctaacaatttggaaaaaagttagatttctaccttaaatctaaatatactgcagatggcttaaagatttaaatgctagaaggtaaaccataaaagaatccgaatacttacacaattttaggataggggacaacttcctaagaagacatcatatgaacagactgatagatttcatgacataataatgggaggcttctttctaacaaaacataataaaataaggtcaaactgtgaaaaaaaagacaaacaatatttaacagaggatcaagcattttaatatagaaaaagctcttacaagaattcctgcctcataattgttttccctaagccaagaatgggggggaatttgaccacagtgaaatcagggtttctaagggcaggaggaaggtaggaggggaggggctgaacggagttttcaggatgggggtggacagctcagggggacagctccagggccagggttgggtgacctccatgtggcaggggttccccactctccctggcattcacagtcttatctggtgccagtcacttccccagccagcctgacctccctgcctgggacatttaacattttgccatcttcctcacacatcaggcatttccctgtttccatgacttttgcaaatgctggtccttctgcttggctcactctctttcatctctacctgaaaaaaaatccaactgctccttcaaggctcagctcaaatatcccctgttctgcaaaactgtctttaatccatctgcccccactgcccccaaggaactccccttgggctcctatggcaactgcccatcagtctattcagcacttactatacagcattgtcattttctgctcactggctcactctagacagggagctccagggacccctttccccttctccaggtccggcaaagagcaagtgctcaattaatatttcatgaacaaatgcatcgtactgtgagtgacagagcagggcaactgaactgacactagttgagcttcaggttcagtccatttcttttatattttttgagacagggtcttgctcagtcactcagactggagtgcagtggcatgatcatggctcactacagccttgaactcccgggctcaagcaatcttatcacctcagccccctaagtagctgagactacaggtatgtgccattgtgcccggctaattttttattttttgtagagatggggccttgctatgttattaaggctggtctcaagctcctggcctcaagaggtcctcctgcctgagcctcccaaagtgctgggattataggcatgagccattgtgcatgactgatttatttcctaaaacagcatgcttttatttaaaataagggcaagttatttaactatgatgcaattaagagaaataattatgtataattcaattatgatgcaataatttatcataactgcatcatagttaaaagatgccaagttactgtaagatcagaagacctacgctaaggcacagtggtacgtgaatgcacttgaactattgaaagccgctgtcagactccacaatggctttcatttttatttatttatttatttatttatttattttatttattttttatttttatttttgagacagagtctcgctctgtcgctcaggctggatggagtgcagtggcgcgatctcgactcactgcaagctccgcctcccgggttcacgccattctcctacctcagcctcccgagtagctgggactacaggcgcccgccaccacgcccggctaattttttgtatttttagtagaaacggggttttaccgtgttagccaggatggcctcaatctcctgacctcgtgatccgcccgcctcagcctcccaaagtgctgggattacaggcgtgagccaccgcgcccggcccatttttaaaacatttataaacaaaagaggtttaattgactcatagttctgcatgactgagcaggccttagaatcatggtggaaggcaaggagaagcaaggcacatcttacatgagggcaggaggtggcggggcagagagagagagcgcgcctcaatggctttcaatagttcaagtgcattcacaccaggcgcattcctgcgcttgagattcctagcatcagccaggagcggcttagtgggagaaagagctgcgacggtgatgatagtgacattccaaagttttgtggcaacatgaaggaggaggtgtgtctgcgcttgcacagtgactgcagcccttgggcagatgtggagaatgtgtgaggctaaaggctcccacgcagcatggggcatggggagcctgaatgtaagccccagggcaggaagttttgcctatttgctcaccgtgtaatctccagcatctagaatagcatagtaggcctttggtaaatatctgttgaatggaaggactaaaattagttctggaagtgtctggggatggggcttaagttacctctgcagggtctccaaggctaaatccttttcctgagttagaaaaacagggctgttctcactgaagttttggccttcagagtgtgatgaggagtgcaaaggggcacggggcagcttcaaggacagggctgggaccacagagggtgagaaaagggcacaagggaggaggggtgctcccaagatggcagcccctagagatctgggctgggtcttgctttcctccctggggccagtgcagcaggagagggtgctgggtaggggtgctgggggctgagaggaccaacccagcttcaccaggcccagaagagaagatgcacacagggagaaggcagctgtatgcagtgggctcaataaagaggatttgggctgggcgtggtgagtcatgcctataatctcagtgctttgggaggccaagtggggaggatggcttgaggccaggaattccagaccaacctgggcaacacagcaagaccccatctctatgatacatttaaaaaaaaattagccaggtgagtggtgcacacctgtagttctagttacttgggaggctcaggtgaggggatcagttgagcccaggagttcaaggttggttacggcaagcactccagcctgggtgatggaatgagaaatgaaaccctgtctctaaataaataaataaataaaaagatttgcctctgtataacaggagtttgaatttagggctcaaaaagtcaagtacattctcaaaatcactcagagagtgacaaaatcaggattcaatttcacatctttctaattccagagcctgactttttttcactccgctaaaaaaagtgacgtcacaggcacatggcaggcatggagccccaggcgagccaggtctcagtctgggtcagtgtagccccagggctgggatcagaaccacagtcgttctggagacagggccaaactagggttagaggtcagggaggccaggcctgagaacaacaggctttccgggctttgtgcccccagccagacacagtgtcctgggattggtggcagggcctgctggagcccccagctccctctttccaccccccatctagggcctggcctgaccttcctccccagggcaaggaactggcctggctcttatcctggaggaggctgcagctgctcctgcagccctggtcccagcagacaaaggcgctttctttcctagtacaaggtcttgattgcatgttgccctggatccaaaagttcctatggaggaagcagtttcctcccagggtgtgtgtgtgtgtgtgtgtgtgtgtgtgcacgcacgtgtgtgctgggtttcagggagttgggctgtcagggagtgcaagccctctcccagcctcctgggtttagcctggcattgctcaatctgcatcctttgtgtacatctctaagtgtctatgcatgtgtgtgtacgtggtggtgtgtgattgtatgtatgagcatgtttgtgcatgtccctgcagctgcaggtgcgactgcctagtatgtacctgtgcatatttctgtacacatcagcacatgcttatacacagtcgcaagcctacgtatctgtgtaacttgtgtctgtgcccacatgcgtttgggggtgtatgcatatgtttcatgtgtgtgtctacatgagacacctggtaccaggtccctaactctgctgcctctggctgtgcctccccacaccctctgctgctgtgtgggggctctgcagtatgcaagtcctcctaaaatagccccctttcttcttcccaacccccggccccgcctctgcatttgtctgggaacaacctggcctctttcagctctgggaggaagacaggtttgtacagcttggcttggcccatacactttccaaaactctctggctcccagccaaactctttataaaaaggctcatggggaatagcctaacaggaaggtgggaactctgcctggggggctcaggaaccctgctccaagccccaagattaaatgggagcatcagtcagctgaacttcagccagagacggccctgcagcctgaaggtgaacttggtcaatggacccttcacccccaaagatggggacacagcatctcaaggtctcatgtccagggtggcagagctcggaggggtcccagggctcaggcagctcaactccccatgggcacactggagggagaggcccagagtgatgccccagaccaggcaggagctgagccacttcctagcatcctgcagccccaggccctggtgaccctgccatggataaccctgggtctgcctcttctgcagggaggtgggtgccactgccagacttcagagtagcaggctctgagcctggctggcccttttgctcaaggcctcctgagtccatatcacaaagtcagtgtttgagcacagggttggtttacccagcacttgccttacttggggtgcaggggacctcaagctgtttctcctagtcccactgaggcacaagagaggggctttctgtactgctatctcccctactggggctcaacccagtcttttttttttctttgagactgagtctcactctattgcccaggctggagtgcagtggtgcaatcttggctcactggaacctccgcctcccgcgttcaagtgattctcctgcctcagcctcctgagtagctgggattacaggcacgcaccaccatgcctggctaatttttgtatttttagtggagacggggtttcaccatgttggccaggctggtcccgaactcctaatctcaagcgatccacccaactcggcctcccaaagtgttggaatcacaggtgtgtgccaccgtacctggcctccactgggtcttaagggtgccctagggtgaagatgggagggcagtccaatgggtaagaccctatctcaagtggatgctcagggcacaggtggcacccccctcactggtctgtcacaggagacacaggggctgctgctggagatgccacagccgtgtgggaggggcaggctggtggggcaactgaggaagaggatcccagaagcctgggttcagacatggctccagggggctcctgggtgctggaaacagacgagacaccctcaaagaggctggttccttcagtccatccccactgaccgctgccaaccacccctttcctcttcccttcagaaacctttttccaggcgggagggatggtagctgggaagctttgctcttatctggcatgtgcccaggccaggcaccgaaactcaaaagccaagcagagaatctttttttgtctgcttccgattgtcgtaccttgtccctgagagacactcatggaccagcccagcttgaaaaggagccagagaacacaagaaacaaccagtaactccaaagaaaggtcagggtttcaagaacattgtgcccccccggttgactgtgcagagcaagtacctctttggatggaggttttatttctttgaactcttgttccttacagaggctgggagtggttgggcccacagggtgggggtggtggactccttgtccttgggcctgttttggggatgctgggttgcgcactgggagtggagttggtgggggctctgaattctcccacgctcagtctagggatgggagctgcctctttcttccctcatgggatgctaattatcctcaacttgtctgggagaagaaaggaagtagctgcaggggcttagccaggaggaacacctgctcccctgccccaccgccctccagctctccctccctccctccttccctctctctcagatgcacaccaacactaggagtatccttatatacgtatgtgctgcttcttgacggggaaatttgacaagggactggggtgagggtaggggtgtcttctacctggggaggcccaaggggctgcggctggggctttcctcagcctcatacaatccaccgccccgcccccaacccctgcccaaggcactcacggtgccttgtgcctccgggctctttgccggtctggaaagtctgggatctgtgaatggaaaagcctgggtcagagctggagtggggagtgggtgggggttgggagctgtgtctacagagtttagagttttcttggtctgagccaggaaagagtctaaacacccagcagtgctgagtccttgcctgccctgtgcagcgtggaccttcctcggcccagctctcctgccctatgcaggctttgggagtccctgaggattttcaaagagccccaaggcgctggggacagagaaaggtgaggccaggttgtcatcctgagggggaacaggcacacacagccagcaggggcctgatggtagatgagaccagggtgacgtggcaaagctgcttcagtctggccacagcactgcatcgacctggactcttgagcctctcctagtgtcctgcttctgagagccagctggacatctcagtggggaacaggacagtcactctcgaggcaggaggatcgcttgagcccaggagttcgaggctacagtgagctgtgatcacaccactgcactccagcctgggtgacagagggagattttgtctcaaaaaaacaaaaacaaaaacagacaaacaaaaaagactcagtgtgaagaggggagggggacagggcaactccagtgtttcctccaaagtgaaagtatgccctcgggtttggaggctggccctcaagaagcatgcccaaagccaagggcttcttggaagcattttatctcaaaagtagacatgaatcttatattccactatgtgattcatttttatacaaaaccatgttggagttaatatgaaatatatatatatatatatatatatgtatgtgtgtgtgtgtattttttgagatggagtctcactctgttgcccaggctggagtgcaatggttccatctcggctcactgcaacctctgcctcctgggttcaagcaattctcctgcttcagccttcccagtagctgggatgacaggctcctgccaccacacctggctaatttttgtatttttagtagagatgggcttttgccatgttggccaggctagtctcgaactcctcacctcagatgatccgcccgccttggcctcccaaagtgctgggattacaggcatgagccactgtgcctggccatatgaaatattttaaatgagtttttgcattgaatctatgaataaaattgatgctgcaggatggggatcgacaaactttttctgcaaaggatcagacagtataataaatattttcgactttgcaggctgtgtggtctctgtgaccactgctgtcgtagcccaaaagcagctttgtatagacaatacacaaaggaatgagtatagctgtgtttaataaaactttatttatggccactagaatttggatttgggatcttttttttttttttttttttggagacagagtctcgctctgtcacccaggctggagtagagtggcgcgatctcagctcactgcaagctctgcctcctgggttcacaacattctcctgcttcagcctcccgagtagctgggactacaggcgcccgccaccacacccggctaattttttgtatttttagtagagatggggtttcaccgtgttagccaggatggtctcgatctcctgacctcgtgatctgcctgtcttggcctcccaaagtgctgggattacaggtgtgaggggattatttttatgttcatgaaatatttccctttgattgtccaattatttataaatgtgagtcctggttcttggcttgtgggccgtagctctcactccaccctgggaagaaagcgtgttgggcctgtggctccacatgcaaagccaaggcctgagcaagaacactagattctggaatcagacccatctctaaattcttgttcttcctcattagttatgccactgaaggcaggtgacaacctacctgagcctggtcctctcctggagaacgtgttttggaatgagctcacagaaggcctgcacagtaggtattgactaagcagtgctgtggccacctttagtggtgcatgtagctgagctgcctgggtaggaggaaggtcatggccagcagatgagtgggtgagatgtgcctcttccccctccctagtcagctcccccatccttttccccaggtcattctagctgaacagttgtcctactccctgccatccttctttccaccttccaagattggacactgcttctcatggggctccttggccctgggctggtgagtccaagcacttagacacttactccctaggataagccccagctcagaggcctcccaacaccagcactgcgggatgggagggaaaaactgaggctaactgcctccccactggcctcagggatggtagctgcagtgcaagggccagagcagcctctctccccttgctcatcatttgtgcttagtgctattttatgaagctgcactctagagggatggcctgctccaagcctcagactaaagatgcccagctcccctcctggtcagtttacagttctgggtttactccttctgagttcccgaagcccagccctgacattttccagctggatgattgggcaagttacttagcctctttgggcctgggcctgtttccttgtatgtatgaggataacctcatagggttattgcggggattaagaatttggccataacatatgtagaacaaatcctactcacaggaagtgcctagtaaatagcacactattgctactaagtaaggttaccagataaaatacaggctgtctggttaaatttgagttccagataaacaacagattttttaggctgggggtggtggctcacgtctgtaatcccagcgctgtgggaggctgaggtgagaggattgcttgaggccaggagtttgagaccagctagggcaacatatcaagatcccatctctacaaaagataaaaaattagctgggcatggtggctcatgcctgtggtcccagctacttcagaggctgaggagggggcgtcgcttaagcctgggagttttgaggttgcattttttttttagagacagggtctggctctgctggccaggctggagtgtagtgttgtgatcacagcttcctgcagcctcaacctcctgggctcaagtgatcctcccacctcagcctcctgagtagctgggaccacatgcacacaccatcatgcctggctaatttttcaaaatattttttgtacagatgaggcctctgtatgttgcccaggctcaaactcctggattcaagtgatcctcccccttcagccttccaaagtgctggaattacatggtgagccaccacacccagccaaaaatatttaaataaatttaaaaagggaaaatttttaaaagtgcatataccaaatactgtatgagatatacttactctaaaaaatgtctacatgaaattaaaatttaactgggcgttaactttccctcctaaatctggcactcctacactgagggaggctccacaaacccaggaactttcctgttccccagccccaaaacagcccccacatccctctagtccacccagcacaatgcgctcatgcagaaaaaccttctttcctgcgggcaggacagaaagctggtttcccacagtgctctgagaccaatcccagatccactctgtacttgccttgggacttggaacaagctcttccttgccccttccttatcctgtttttccagtgagactggtaaatcctcttgctggctatccagaaggagtaaaagacctatgattcaacagaatcagcagtattaagaatctaattgattgggccagtggctcacacctgtaatcccagcactttgggaggccgaggcgggcggatcacctgaggttgggggtttgagaccagcctgaccaacatggagaaaccccatctctactaaaaatacaaaattagccaggcgtggtggtgggcgcgtgtaatcccagctactcaggaggctgaggcaggaaaatcgcttgaacccaggaggtggaggttgcagtgagctgagattgcaccattgcactccagcctgggcaacaagagcgaaactccatctcaaaaaaataaaaataaacaaagactctgattaatcatttcaatgaaccccatcaacagccctattagtgcaaactatcattatccccattttacagatgaggaaacagacttggagaagggtgttccaagtggctgttcctcccctgcaactggccctcattctaggtcttcccattgtcctccaaggcttgggctgagccagaactcaaaccccaaggccatctaggaggcaccaacttgtcacagccatgctcagactccatgtccaaattaacctcatcagcttcccagaaggagccagcgttgaactcacccttttccctattccctattttgtcccatagataccttgctgagtttggattatgaaagtggccacaatgcccaccactaggcagccaagatctaaattactgggctgggtgaaccctacttctgacctaataaataaatcctgtggtttccagaagaggtaaatgaacaatacttcttacaagaggccatttaaggaatctggtgtaaatgaatctagcatcaagttttccagagggtgtgacacttatttgagtgttctgtttttcctggtgccaatttttccgagtgtaatttcttcacttttggtttctgagatagaggccccagaatgttatcacgaaaggcaaaattggggtgctgtctccccagctggtgggactgcggggtctagcccagctctgctgttcatgattgacaagatagctttggcagcctctctgctggctttcaggaggcaaattcgatgttggcatccctctacccagtgcccaagatgctgtgaggacaaatgaggtcactaatggcaaacacacaccaacagtagtccagtgtgctgaaccaactattcctattctgcccttgtacaaggtagtatttcctgggacagtgttttaggtaaaaaatgaaaccaagaccctttactacttattgtttaagttattatgagggctccctatatcttgattagaggcctataaaacctaaggccttcctgtaacaatgcccatccatgcttcaggccattcatgcacccatctgatggtgcttagttgggacccaacaagatgaggctgcgtcagtctcttgctcagccttcaaagaggctttggcactttcctgccagcctcattggtaacttctgacccaccccttttggggttgagacaccatgctcaggagcacagagttctgaaaaaccttgagaatttcagctaccctggtgatcctgtgttttatgagcctactctaacctatgcaaatctagttcccccatacattccaggtgtgtgattgaggtgggactcttggtacggagcttaagaagtggcactggggatgtaccagctgagagcgttcaggcctccagtctgtggagcaggatgctgtgctgccaattcctttttttttttttttttgagatggagtctcgctctgtcgcccaggctggagtgcagtggcatgatctcggctcactgcaatctctgcctcccaggtttaagcgtttctcctgcctcagcttcctgagtagctgggattacaggcgtctgccaccacgcccagctaatttttgtatttttagtagagacggggtttcaccatgtcggccaggcaggtctcgaactcctgacctcaagtgatctgcctgcctcagcctcccaaagtgctgggattataggcatgagtcacctcgcccagccccaactcccttctagggcatgttttaaccacgtgttctggtcagttggtcaagagacaggccaagtcaaccctcatgatgaatattcgacaagccctcagtagggtgcccagcacggatcagacacctcggaaaggcgatgggcataccatgtactcatcaatgccccaggcagcaggagacacccaagtgccactgaattcctcaaatacaaatgtgacttttaaactttttcttttgtttttaaatccaggatcaagaccacaatttattatgtaagacatggggtgaagaatggtcaaggaaagttatggccgtgagtgacatggaattagatgaaaaggctcaagtttgctgaagagagtttaaatttggcttttgctcttggaaacgtcaaaataatcataagaagcacttgtgccttacagagcaaataatccacagagtgtcatattcattttgcaaacagggtcacaacagcagtcaaatagaagcctgaacacccagagagttaacatacagattccataaggataacaagggattgagcatgctggtgggtttttaagtcagatccacattgaaccctgtgacctaccggaggttataagtggaacccggggaaagcagcttttccatacaaaacaacaacaacacaacgacaacaaagaaaaccagactctgctggatgtctataatactcatttgcagtaaggctttcaagatacaggaatttttatagcatttgtattttaaggatttagggcaaatacatttttttttctacttgataaaaagaaaattagtacttaaaaggttcaaaaatatattgattgagttatttttcttacataaataaattatattgatttttaggatttaacagctgaaaaaaccctttctgcttccactggaggcaaaactgaacaaaatgttagttaaatagagagagcagcatttctaagaaatctgtggtcagcattatagaccatctatgctacaaggatgtcattaaataggatttgttcaattactggattcttcttctatgatcagttatagaatttctggtttatatctctgattcataaaactgggactccactttttgaagatacatctgattgatttttttcagtcatgatttaacagacttctttgagatgctcattttaacatttacataatttataatcccaaatgtataaaagacaatgaaaaaagcatcataaataaataatgcaaaatgaaatagttatgtcagacttttggaccttctgataaattagcaaaactgtaacagaaaaagtaaaaaatacagtaaattgtgacaacaaaaagtgaaactggtactagtaacacttgcaacatttccaagggtcctgcgcagccctgcgcccccagagtactgaaccatgagcttacttcaagtctcagagtgtgaactacctgtgaagagtgagaccatcagaagggacgttaacatgaaggtgaaaggacatggggaagtgctgcttaggcagtttctttctcagttcctaaacatggagaagctgaggaagaagagaaaataatgttgacttgcaatgtagtttcgattaactgataatttggaatttgggtccaactgtaagatataaacagaatggagaaattaatggagaagtaacttttcatagctgtattataaagggtggcacacatttgacagcctcagacactcttgatcaaaggacctactagcaagtgtcaaagtgttgggcaactgtcttcttgcaggctccagaaagaaccttattcttggtgaaggaaagcctgaagtgaaaatccattcggtcctggtgctctttaaacacagagaggcaaattaatggctagagaaatctgtaagcgaaccaggtgagagcagagcgctagccgtgtgcttgtgaagcagcgtgtagctctacggagcgcgggtccttgccccacccccgtcgacagcaataactcatggtgggtaaagctttctcgcagcaagaggaatcttttcactggtgagagggatgtatagaaaataatgcctagtcagtcagtatttcttcttgctgcaggtgtctgaaaaaccaccaagggggaaattatattactaccggtaaggtttttgttttttataaagaaatgaatatatgtattttcaaccattagttatatacttctgtctatactactcacttagtaatcatgataaaatagggaaatattttaactcaaaaatatgcaccagcacttcctttttctgtgctttttggttccctgtgacattcttcctgtgcaacccagctcacagaaaaagagctcctctttgtctctgttcttccacccttcaatggtaaaaccctagacagctttcttttgccatttttcctcctcaagtgagtgggaaacttggaagagaagggggtagggcgtgtcaccaagtactgtattaactatgattgctggaatgaactggataacagaatgagaattctgtgcctcctagactaggtagacaacacttatctaatgaagtggtgagaccctgcaactattaacatctgttaccatagttctcagacaggaaatcaggtacgtaatcttacttatggaaacacaggttcttatggaggtgaagtgagggaagtaacaaacctttatgggataagaaacttacaagtcacaataatttcttaaatgaaaaaagttctaattggtgtcgttgttggagtctttgagtgccccctccccagcctgtgccccatgttctctctctgcgggcaaaggggcactgggttcggcacagttctcatcaccgctgggctccctttcacagctgggagcaggctctgggtgggagttggggttgtccccctttgtcttcttcttcttcctcttctggctctccagacctactatttccgagtgtctggcctgctgcatggctggcagagccatgcccataccaggggagaggaacatggatgggtaaatgagtccaggagatactcctgggatgagaaatgggttaaaagccacaggactactagtagttattgcaggttcagactgatcagaaaatggacctggaccaggcttgtcctcagctaaagtgtctgttttcacatcatggctactcggcttgtcttccgcagtcttttcagtcactgccgtaccacttttcgttgtgcttgatagagacgccggagcagtggaagtgcaggtggttgccatgggtggactgaggagtcccccaacaccaaacatctggggcacagcagccatgcctggcagcatcatgggcagcatgctcagggtacttttgacctcttcacctgttggcatcgtggcaaagccagctggaaaccccaccagcccggtgagggggatgcctggcatatttctcatgttctgaagtcctaccaggtccatcccagcaatcagtccattcatgaacagtggccccattccagagggagagtctgccacaatggaaggagccttcaggagttcgctccgaggccgcctccccctcctgcgggggcccgtatctcgaagaataggctcagccagagtgtgattgaacttgttttctggaagaaacccctggaaaaacaaagaaacacaaaatgctgaaggcaacaggatggcaggtggtcagctgagggtgatgaccagggctctgcactggcctggcctgtctccagctgcacgaagggttcccagtacaaggagcacctcccgcctacttgtgcagctctctggcctgactgtacctgacaggcttctccctcagcagctgagaacattttgtggcatgggcacaactagggcacctgtcactgcccagtggtaattccaacatgctgactggcaaaagtggcatccagtctgtgagaagctggcagaagagagtggggagctggagaaagcactaaaagtgctctggttctcggtgagactgttatggctgagaccccttcaccagatcccaacacttgccttcctcttgacacaggtttttattgaagcaacaaagcagaatatgtaagacagggttttaatcccaagtttaaatcctgactgcaacctcctagctgtgggactcaggacatgtcagttagcctctgagtttaagtaaaaaaggacaatggtacctatctttagagtcacggaaagtgacgtgtttaatacattacctgatccataggaagcagtgcttgctaatggcacattacttatttattgtgtgtatgccccactcctctctgaatacaatgggatgtgtacatgtttgctgaagaaatgaaggacttcttgaacactgttggggaaactgccaccaaaataagtggtggttctccctaagggagaccatctattttttctctatttggaggttcactctccaattttcttaattagcagagagttctgcagtaaagcacttctgctccacgtggaccacactgtgacaggacctgggccctcaacacgggtgatctggcatctgcactggacattcccataacccatcaggatggctgagctgcacagaatcctgggggagggcagattgctccagcagcatcagcgagcggaaggcagcacgtggaaaggaaggcgcaggctgcagccccacaccctccttcctgagagtggagctcaggagctctgcagggcagagaggatgcagccaggaacctggtccctggagcgtaaacaaaccactgcaattacgatggatctttctctgaatttataatccctagagattgagagaatttcttcccacagatgggaagcgatttctttcaggacttagtgccgcagtccctgcgcccctggagaactgcatgcctttctctctctcgactgccctccacacctcactgctatcagctagtttatcaactagtacatgcccatggtattaaaaaaggtgaactgtacttgtgcagttcagcagtctcagcgtttcctcacccaggggaggtgtacagtttgaggacaaagccctcccctgctggcaccctccctgactgcctgggcatcttcttacggttcttgctacaaagtcagtgctgttttatccccttccctttgattacagcaatggtgaagcaaaatgttcagagtggcttcaatggatcttgtcacactggattccactgaggtcaatggtcaccatcaaggccggaatgcgcagcctacggagcagcatgagacaggagagctcaacagtgaggggtgaggcctctgggctgctgaggcaactcccagggctgcacctgcggccttttcaggattctcctttggaataccttcccttccactagagtctgcagagtggggggtggggatgtgacaagcagcagctgaggctccaccagcccacagcctccttgtctgtgggaatcagaggcagggatctggctgttgctctcactggggtacactcttggggtgcgaaaggagatgtgggtccaccaagagacaccagaatgaccagaaaaaccccacagaacgcagagaaagaagccagggaagctgaggatatctctgggctgagactggccaccaggcctgagggcagttaagaaatctatttacaatctgcctaagggcacctacttttaactttaatttggcagcccaggcatttcccatttttcccactgcctctcttctccataaactatgaaataagcaaatccttagaagacccagcagatttttatttaaggggcagctgtaaccttagctggtggtactggtttcaggttctcatgggctgtaagaacacacgtgtgtggtgggccccaaatgagcagcagctggactgtgttggttcccacactagtgggcactcagcagcgaggggaacggctgtcagaggcagcagggaaggcggtgctgataagaggatgagcagcagaagagtgcgagacgccacgaaggaagcactgatcacgtgtcaggcactgtacgaagggcttcagcagcatctcaacaaatcagtgaatcagccctgtggagtcagtactatcatcatgcctgctttacagagaatttacagattcatagatgtgtgaaaacgtgcatatctgaatgtttctgagtccccagaaatattttttgaactcctacacctgtccttcagtttcccaagaatattaaaaaaataaaaaataaaaaaaaaacccagttcatcatagacaaaaaagcttcatgatggcaactttaagaaaattcttctcaaaaagccttggtttgcatcacagagctggaagaaacccctgaaactgttatatttagtccccttcgttttcacaagctgggggtgggggtggggagggtacagttggtcagggacagagcaggtgagaacacaggccctgtggttcccagcccaggcctctttccacagcacaccacaccctctcttcttcccagcatgacctgccacttgcaatttgctaggctggcaactgcacactctggctctagggaggatcactggggacgcaattcctggctggttcctgttttgaaagagagacagtaggacttgatgggtcggggccaggctaaaaggataatttctcaccagtctgtcttgagctcatcaatgcaaatcgtctcattctgggccagccactctgtctacacagcacagtctcagtcccttgctggcatggcaccacagcccagggtgcttcagccagggtaaccacaacttgaccacatatctttctgagccctcttcctgcagcctacccacaaccgagaggcagagaaagatactggggagtgtctttcctttacatccacaaatgtgccctcataactccagagagagggggcatattccacctcagaggtctttctgttaggaagaaaacaagcccagcacttgatgaatggtgcctccttcttcttttcaagcaatctgctataaatcagatcttctttaacatgctttgagaccctcctcaggggatctaggaccagactatgccccagaggacctttggccaccttggccctggcccagtaagtgcaagtagcactctcaggatctgggatgtcaaaagcatcctttccctgctcttgctgagaaccatgagtgcagacacaatggtgggtcctttcagaaatgagaacttgcttagaaggcacaagctaatctttcttcccctctagatgaggagaatagcagcagaaatgccccgaggataaagagaacgctcttcatttgcagcagagcaagagcgctggcaaaggaagtcagctttaaccatgtcctgtggaggagtcaccccagccaccagctgctgcccactccagtcaggtgcccctcccagcagcgcggcgaccacacacagcggccaggcgggctttggcagctctccctcctggtaattataccctgggagcaaacctgcttccccttccaggaaaggcctgcggagggggcaaagggaacaaggaaaaggagcttccttatgttcaagcacactggaggcaaatctgctttctatctaattgcacaggcattccagcctaagaagaacatcctcatcaatgcatggtggcattattccaactctaaaacttaactctgggtggacttaagagaaggtggtgaccagaacttcctttctcctccgaaggttagtacattcatccaacaaacgcacgctgggtgaaaagagacctaacgacaaaatgcgacgtgtggctcttcatttaaaaatcctaaaaccaaaccaaaacacaacaaccagctctaaaagacatttttgagataactggtggaatctgaatatagactagataacaagtattattaatatgcatgtgtaataagggcaataattatgcaggaaaatgttctttatgagatgcatgctgaagtatttaggggtgatatgtcatgtctgcaatttactgtcaaatggcccagcaaaacctcaaaactatacacatacaggtaaaaccaatatatacatatgtaacttacatatataaactatattaagtatatgtgtgtgtatacatatatttaatgagtaaccactaggtagtgggcattaaaaattgaatcccacaaccttccatgcagcccgcgcaatgataattctgtggacaccacccgtccaaaccacagcacgtgtggcagaagggccatgtgagctcgaaggaagggaggaggagttccttgtgagatttaaatctatttctaaaaagaggggtagggtttccgctataaatgtttcaaattactatgctgatatcctgtgccccaaggtgatggtaataggatgcggggggtttaggacggtgattaggtcataggggtcgagcccttatgaatggaattagtgaccttatgagagctggctgtcccttcctccatgcgagggcacagtgagaagacaccagtctggatgatgtggtatggggcctcaccagatacccaatctgtcagtgccttgaccttggacatttgggtctccagaactgtgagaaataaatttctgttgcttataagcctcccagtattctgttatggtagtcggaatggactaaggttctatggcaaagaaaaagggtacagtgcaccctagaaggccctgtcccaagaggagctgcaggagatacacgggtgcccctgttcggaaggctgagctgcccgaggtcttcttcttgccttactgcaggaaaagggcctccgaggcagggagtgtgtttatttaataaaagaggctaacacatctctgggaagaggctggcttgcaagaacagcttagaaatgggttttctggcaaagggtcagcatctgtagggagggatgaacactaatttccaaggaacatgagggaaactgttagacacggggaaagaaacaagcaagccaagggggaaccacatggctcttcctgagacatctctaaagcaagagctcagagactacaacaaagcaagaaccggagatcttcccttgatggcgtatctgagacaccgtgtgccgagacaaaaggagaaggtgggaggcagcgtgaaggggtgaggaaagacagaggggacacaaacaaaggtgaactagctcgtactgctcacgcaagtggaagaaagtgagggaagagtcctaagaaaagggtagaagggacattttctgagactaaagcaagaggggaaaaaagggcagcttctccaacgtgacaaactgtctagggcccaagtctcccccaaaggggctgtggtagcagatggagatgagcaacggccactggtggagctactagaccagcggtcatccaggtgacactcttgaacaagttccctgagaacattaaatgccaaactctttctgcgagaggaggaaatgactagggtgggcggtcttttggagctataaaaagaaatcacattcaagcaatcccaccgagaagggaattcctactccaggaaagatgtagctggcagagtacttaagagaaggcattcaggaaagcttgagtttatggaacaacctgggaaaggcaaaagtccccatgagcatcttcaggagctccctatttgggcagaaagtgcttttaggaggctaaaagcacatttatgtataatctgcccaaactcaacacattttcaagttgaaatgttgttactgccctctagaggttatgacttttgtagtccaaatttgtactaatctgtaaactataattaactcggattcgttatactagaagtattctgcagaagtctttgaagtcccttccagtgtcatgatgctataataggaaaagggtagtgcttagaggcagctgtttttcattgccagtgaggctggaccaggaagaaatgtcttaaatggtagccaaaaaaacctaaattaggaaatgaaaacttccaataatgagttttgttcactgacaaaggttaaaatttctttcccctcataactctacaaataggagaaacaaaacacaaacccaagttttggcaatggtttaacaaacaattctggaggtaagggttgaaaacaaatgaccactgggagtcacagagcgctcaaaaatgccacagcaccatttcttgctgctaatcaacttcctgtgctggcttctagtcctcttgaaagatgtctcccagcgaaccccttcccagctggggctttctctcaagtatgtaaggcacggctcaaccaggatgctcctcctggccccacactcacgtggccttcttccttaccctcagtcctggctccttggggatggcaggaactctctcttccccgctcagggagctgacatctaattttccaggttctttacagcgtggcctcctctgctttggtttgtctgaaaaattctaggatgaaaacggagaccaatattacaaaacatgctatcccagattcttctgatgaggctgatgcttttcaactggttttgctattgttctcgtcaatggttgtctgcacaggagctggccaggttaaactaaaggaaatagccacctggcttcacctaggctttctctcctgaagcaccagtgttcctacagtaatctggaaaacaggctgtgtgggcacccccgccctccagactagaacacctgagccgattcaccaggctgccagggccctgttaatccctggccttttcctcttgatcatttccttgcattctcttgtcactgctacttgcctggctggtttcgcctgtctctggagggtgcacatctgtgaatgtgttctcctcttcctgtgcgctctctacctacatatcttattagttaggcgcacccaggacaaagacagtggtggggtagatgagcaagtgagaagagaaaaaccaaaaaagacatctgtgctcgagtcctctcctaaaaatgtctagtctgagggacttaggacaaagacagtacgatgacttgaagggaatgtcctaaagcagaataaccataaaactaaggacagaccgtcccccaaccaccgcaaatggaatgtacataaaactaaggacagatggtcccccaaccaccacaaatggaacgtattaacttgaaaagaattcaaaggaacattttcataggtggcagagtttatgcaacctaaagatttctctatgagcttatgatactgtgtggcaatttttgtggggacagcggataagttctgtcctcttaggattttgcatgtctactttttggcatagtattttgagatgggctatcatttctattactgaagaatttaatcaaaatttaaacttaaaaacaaaagtcctttaacatgatgttgtcagctgacagatttctcccaaacagctcccaacttcctggttgccctcagcatgctttcatcaaaaatagcaacaagtcagcaggaagtaaacagtgatctcaggcagtaccaacaaacacttactgccccaaagccaggaacttctaaggagtagtcagcctgctgccttagccagtcaagcagactcttgctgggaatggatttctcggcttggctgctggctgccgtagctggctcaggagccgaggtggcaggccctggcccctcagggtgtgtggtgctcaaggtggcctgccctgggtcttcatggacttcctggatgaaggaaaaacgagtatgtataatcacgacacaatgaaaattagtttctaaagaaagaaaacatgtaaggtgttatttgaatcactccacctatttccaccctgatattactcagctggggtgcctgaattagaaccctacacacaccactgacccacgcccacataagctcttgcaagtgatttggtgttcccttcacctgagcactcctctcccgctcttgtccacttggtacactttaactccatcctgactgccggattcagttttcctcctctgtcaccactgcccactgtcccaggcagcactcactgctccagctcctgtccccacagcactcggttcctagctctctcacataaagaaaacgccataccacaatttactcaccctctatagtttgaatgcctgtcttacctctgttttactaatgcctataatggggtctataacaatgaccatgctaaataagtgtttgcatcaataaattaaaaaaatactctgaggacaagggggaaaatttttatcggtcattccattggaattctatgatcattatagagaaactatggtgttgcacatctaaaaaaggtaaaagacttcttaaaagcttgcaggattgagcagggaaagaacgtgtcacttcagcttcccagattactttgaaagtctaagaggaagacataacccaagcaatatggcttagcagtaaagttctcagcccctagagaaaaaggtccttggtttggtttcctgctttgtcacttactagctggataatcttggggaaattatttaatgctttaaagccttattttcctcacctataaaatgggaataacaaagcccatcttcagagtggttgtgaggaacaaacaagataatcatgtaaagccttgaacatggtaagcagtaggcactcaataagtactagttattattattgcttttaaaataagaaaacataaaatgtgattcctgttttggagctcagaatccagtaaatgggaaaacccaaaatacaacatgaaacattaaacaaagcgtaaaagggatctctcttggccaggtatacggtttctgaccttttctgttgtttgcaaatgatttcctttgagtttggaacaaactgtcttagcatgatctccgtaaatcttcaaccctccgtggtagatgctgttgccccactttacacaggagcaaagtgagtctcagttgtagcccaatatcacccagtaagtcaagcagaagagccaggatcacattcaggtagccctgactcctgttctttctcccataccccagtcttggagagcctcactaccccggagaaaagccgctgcacactcaaccctgccatcttgctctgccgtgccgtcaacagtggctcttctgaaaccctggaggagcggggttgttcctatttgaaatggcaagacctcctggctcatttctccaggctgtaagcagattaagcgccattaatgagttagtaactatctagttctacagaagatggagggcatcttataatgagagaaaataaagcaggacaaccgaaatagagataaaagatccacaaattattttgcgtctgaggaagaagggtttgtttctcagtgtagaaaggtaaatgtttttaatctaatgacctcaatacccaccaagattcccgcctgaagtgtctgctccttcaaaaagatgaggtccatccctccttcaacatgtttccgcctccctctccgcctcctcgtggctgcatcatctcttctgaggcttccattgacaatctgtccagtcacaggatggatcaggccagcttgcagaatcccagacaagtccatgccaagggctccctgaagtgaactgatagccccaatcttaggggtgctggcgctcactgggaaaggggatgtggctcctggggacccctctgatgagcaggagaggtccatagctgactccccatgccagccattgaggatgataggggtgtgcccgtgggtggcagagaactgctccaggccccgagcctttgcatccctctccacctcaaactcatagggacgcctgtgcttttgttcatcctttgtgaatactggagctaagaagctctcctgtgaacacacaaacagcaagagaggtctgaatgtcacacaagtggctgaatgctagctctttctccaggcctgatttccctaggcctcatattgtttccaatcatctttttaggagttcttctaactcaggcctcctcaaacctgaacagcttgttaaaatgcagattctacttcagtgggtctgaggtagagcctgagaatctgcttttttaacaggtttccaggtgctgctaaagctgctatgctagtccgtgaactacatttggtgttgcaagatgataactcagaaatgctcaacctcacctgtgcatcagaatcacctgggaagtttaaaacaactcagtacccaggacacactccagactgaataagtcagcatcgttagcttgtcacggtccccagctgattccaatgtgcagttgagcatgagaaccagctagttaataatgtatctcaaaactcatcacccccaccaaaacgctcactcctgccttgatttccctaatttctatcagcttccattgttagagctcagttctctaagggtcaaccacactgttccattcatgcttccctttccttatatatttattagtcatggggtcatctttgccagttcccccctatctttgtatccactctgaaacaaccggggtctagaacctctctttatcagtttcctgcttggcccccctagccaagctgtattctactccaagtgagctgcaaacctctgctttcatcatgccttctcctgctccaatacttttactagctcttcactacatacaggataaagtctaaattccccaatcaacactaatggcttggcaaaaaaaaacccctatccactcagtaaatacttgctgaatgaatgaactcaacagagacgtggaacacgcccaccattctttgttttgtggtcactccattcttgccggctcaccttgtggatctgggccgccaatgctgcgccgttgctgaagctgtgttctgctgcttccggctctgagaggctggttcgagaaccagcactgctggttaataccggggtgggcagtgtgcctgagggctcatactgctggctagagggccacttcccctttaacaccacgtggcagatattatctaggcggttaattatcacgcggtcctagaaaaaaggataaagctctgatgaataaggatcgagttacctaaattcacaaaatcctttgagatcaagggttaagcttttcaccagaaggagtcgataagaaaagagcacactcaaacatactcactttataaggcttaaaataaaaatcatagtctggacaatacaaattaaagccatcgtactataaataagaggacaatttgacaccttcatcttacagtcgaattagttaagcgcatgtatctttaatgttcaaatgctacataactaatatcttttaaaggtattaaacatttctgagtttcttgttcagaactatttctaaaagggttaaaaaaagcaattcaaagctgggaatggtttgggggtagggtgggaaacgcaagctctggggtacctttggccactcagagaaggaatagagagttttctcctgtagcagctgagcaatagtgggagctcgagcctcctgtagctcatccccaatgtctcctgtgatgcccgatgttgagctcttgctctcctcttcagagtacttccctggataatctgggaagaggttaaaaaattaatcaggcacttaactatagtagtgagatactagtgatctgagagattaggatatcctcttttccttttgctttttaaattagctcattctgtgctattttaaatggaatattaattatgatatcttctatttccaggagaaccgtatcagttaagccataaaagcaaatcctgctctggggctcccaaggcaagtcttctagtgagcatttgcatccatatcccaacacaagaaaagagaaaggaaatttttcttgtgtatccaagagtgaaagagatgactaaccacaaagaggcttctcacttagtgtagtggtcaagggaaagctgaacattctaacactttgagatctttgaagggacagtctatgaaatgtaacacggcaagacggtgattaatatgagaaaggatgaaagtcatgaagcttacaacaaaggtaagacagacctgattcatgtaaaaaaagatgccaagaaactcagaacatttcaattacttcactcatggaaagaaatggacatgtaacttattctttcaagcttcagtaatggtgaaagtttatcatcaatgtgtcaacgtgaatggatcttcaaagatccacttacaggaaatgaacagacaatggaaaaacacctaaggcaggaaaagttgttgacctctttcttggttaaatgacaaggagcatccatcctttgaaatgtggctatttcacttctcaatgtgcaacaagtctcctagggagctgcagcgacctgaccatgaaaaacagggccttgctaggcctggtagactcaggataagccagacagataccgcccaggtcctcaagattcttacagccctatgagggaagacagccaggaaagaggtgacaataaaggagcaactaaaattatcagctgtgataagtactatcaagggaaagaaacaagacgccatgatagggaacaagagggaagaacctactcaagtaggttgttagagagtctctcggaggagggagctcccatgaagatgaggaggcaacagggaagggtattgtggacatgctgaggaacgaagtgagggccaggaggaaagcacaaagatgaggctagaggggtggaaatcatctagaacatgctgagtcctctaggccagaatagaaaatttagattttattctagattcaatgggggaccaccactgaaaggttttaagcagaggagttgaatttaagttttttttttttaaaagcaaaatcatgtgagacagaaaacctggaaaaagccaggagacctgggggctggccctgacaggtgtaccaattaattactgctccttcaggactgtagatttctagtctcgaaagcagggctaatcctctctggcctacctgtcccacacctcatatgtgtggaggatcccttccagggtctgcaaaagcacttttaaaagcatcagtgaaagggactcccacccacgcgtgcacatgatgctcaccaaagcttattaaggtcactgctccctctactctgacttagcaaggctgacgctgccatcaaaggacaccagttcaggaacataatttctcctctaaaccatacttatctttaccttgtactcacttgattgcctgggtttccaaggactgataatttggttatttttacccgcaacagggttcaaaaagcaatgtgggttttataattcaacacatggcagcaatgcttcgtggcctgccatgaggaggatcaggcatagttgtagactggctccttctgggttggctggggttacaactctatcaagctactttcaatttggcttctcggtttttatcttagctagtatgtaaattttaatttgggttcagactcttcccaagagttctgaataactaaaaccaagacgaggagtttaaaaataaaaagctagataacctgaggctgggtgcagtggctcacgtctgtaatcccagcactttgggaggctgaggcaagtggattgcttgaagccagaagttcaagaccagcctggccaacatggtgaaactctgtactaaaaatacaaaaatcagtcagacgtggtggcacacacctgtaatcccagcttgggatgttgaacccaggaggcacaggttgcagtgagctgagattgcgccactgcactccagcctgggtgacagagcaagactctgtctcaaaaaaaaaaaaaaaaaaaaaaaaaaaaaaaaaaaaaggctagataacttgagggacttagcttagctcctctctttccctctttaacataaaatcagtgctccagaaagggacaatgtgtctgtctacacccctcagcaccacagtggaccaggcatgaaaggagttgtttttggttttttgttcaccctaataggccttcttggatctgaaaaaaattaaaactacagctaacaatcattttgttgctgttgttcctcaggatccctgatcactgtatgtctattcttgcaaagcccatagaatctcagggtcacctagattcttaacattttgaaattccttctagcttaaacccttatataagatttccctataggatcagatctattttcttcattgttgtaaactttttatttctgttgagttactgaaaggaatctaaatcaaatgcactgaccttaagccacacagttttgacaatgacatgaataaatggcttttttgctcaccttaacaaagatcaaatttatttgtatttttgttcagttcctgaaaaattaactgcccctatattaaagtgcaagttcctaacatcccaaggctgttctactttagccagtttgaagcaccttatctaggggaagaacaaactatttccccttaacaccatacatagcatctattgaatgaaaacacacaagcccctgcccaaattatatgagtgaggcagccaaactgctatgattgtctatgatcttcaattttctacaacatgaccacagttactaagctactcgaattttcagtccaaggcctatgacctttggtgagggtaggcaggtctgtttcagaagctgtaaaaatatgaagcactctctcccctaaaacccaaccccccgtcgtgtgtgaactagtttatccaaaatgccacaagatcctacatactgtaccttgactatggcagtttccgtctctatcataatcatctttattctcaaaatccatgtcttctgatttgagctcacttccttcaagaggatatgtggggaaaacgttttgcccctctgcactttctttccaaggttcttttaaaagctcatgcttcactttaaacggctgtgatggaatagcagtgggttcaccctccatggcgatagtattggttttacttttgaacagatctgggatataagccttgggtttctcgatttcaaattcatcattctcgaggccatgcatccacctctccatgtgtttgcagtggcactgacaggctgctggagcggggaaagccctctgtagcccaggagtctggtttgccacctctaagcttcctttcttggtttcatcttggaagccttggttcttttcccttgagatgttagtagtgggctccgtgagatgcaatacctctggcctttcccccatgcctactgccatggctaagttttcctcctcgttttcctcctcttcttcctcctcatcactgtggttctgactcaaaatcaatttactttctaagcttttgttttccaataaatcaattaattgctgatctgatgacaggtttcttttggagtcacagacactaagactgcacatatctacaaacccactttcatttcctggattcaaggaaggggaagctaaacacttggcttccagctggccaatgttttcaggtctctgtcctgcctcactgcagcagagctccccttcctttgaaatagacatcaacaaatgttttccatttttgatgtttgcttgagctactcctcctgcttctaagctacccataaaagtagggccagaagctatttctgcctcagggccaccagactggcagttcccatctttgcttattgagatggtaataacatcttttctagattcagtattggtacttgggctctcctgaaaagagcttggttcttggctgagcaccttcttaccatacatcatgctctctaaggactcaggcagcagactttcatcatggttgatggaaatgacatcctgaactttagaaataaagttttcacatgtcacatcaggcaggctgagatgatcatctctgctttctactctcactagattttcaggttcattttcaagggactctgaagtcctactcatttgagaatatgtaagagattcatataacttggagttggtctggtaaaggcaacagagatttcctggtgcctgggtgccagatcttttatgctgggcatagtttctataggcatccaggaaggacagctgggggtcgttcatgatgtaacagtcagtgcggttcagcccatgtttggcagtgccgatgagcaggtctcgatcatgcttcccacactcccaccagactgggaggtagaggctgggcctgcacagctggaggcgttcatgcagctgagggcacttgagcacttgctctcggactttccgtaacagttcaatgcggtacagagttcttgcagcacgttcctcagtgatgggttcaacgtagatggtggtatctgggggacctggagagaaagggaaataaagcctatcactgaaggtgacctcagacactccccgcccacctgagcccctgcatctttggtcttggagtttagctccctggctcctcagcatggcagtttcaggtgtgtgagcccttgccaaaataggaaactgaaaaagaatggaaggcttttatgaaacaaggacagacccaaagggtgtgaaagaagagcataaaaattccagttctgaaaacagtattagtttcctttaaataagcatgtactaggccaggcatagtatagtagtagttcacacctgtaatcccagcactttgagaggcagaggctaggaggatcacttgaggccaggagttcaagaccagcccgggcaacaaagtgagaccccaccccccatgtctacaaaaaataaaaaaaattatctgggcatggtagcatgtacctatagtctggctgcttggaaggctgagacaagaggatctgggaacccaggagtttgaggttacagtgagctgtgatcatgtcactgtactctacactaggtactttatacacatctcttagttctcatgaaaatcctaccataccatcatcatgcctgtcctatttcaaggataaggaaattggctcagataaactaccttgctccacgtgacagaaccaggatttaaatccaggttttgtcagtgtgactccaaggtccaccatctttccaatatattcagctccctggcttggatgacaacactttagccctgccatataggaggcaaaggctggtatgtcttgtgcgtgctgccatcagccctgaacccacactgagtaggctcaatggttgctttggctttcctaaaatattgtcccatgatccagaggaactccatctacaaatacgaggctacagggaggcctgaaggaagctgttgcaagtgccaaccatgaagacatttttcaaaagggttctctattgcatcaggggatatttaaatgacagccacttactttctatagttacaagtcgacatgtgaggaaatacttaaagttattaagacttaatctaaggaaggtgcaaagttcagagtaggataaatctgaacatgacttaaaaaaaaccatgactttaaaaaaacccttatactttggagaaagtggttggcagtcttccaatatttctgtgatgttttaagctgaatttcaactttcactgaagttacatcattttgggagagagattttattttatgaggtggacccaattagaagttcatgaatttctaaaagccactcatctttacctaaattcctcatgtagactctagtttttataggtatacctaaagtaattctgcaatttgaaaatcagaatgttctttccttgtatcatctgacaatatactgatagttttctcaccgccatctttccatgtgggtagacgacagacattccggcacatggccacaaaactataaaaatactgttccaggctctcatccgacttcttgtccaaacgggaaatgatgcggaactgtgtccagtcaaaggttttcttttcttgatcgtaaacaacaccaaaggaagacactgttctatagaagtctgcttgttctctcctagtccaccttgagatttaatcagaaaggaagagtgagctctttcttctttttttaaagccaataactgcttattgagagcctactatgagagcccataaagtcaagaaaggaggcagagctggtttgtctcttttattatttttatttaagttaaactgggctgaagggcttataatgaaaacagcctattatccaactcccaaagaggtaatcacttccaaatctttcagctctttcttctggtatttacctccctatttctaaaccaggtatacacttgctatctcttgattcatcaattttaggaatcacctagttaacttctgcctgtagatgatgaagatttttaaaatactatatatgcttaaatatctagccttatttttttttacccgtatggcaatatagaagcagagaatcctgaagggatgttccagaccattaaattcaacctccttatcttactggtgtcccgaagggaagtgactacttcagtgacacaacccctgcctccccatctcatattgcttttctttgtggttttatgtaggtaggttgtccatgacaattatcttctctgggacacaaaggtcctctagtctttatatcctatacgagtaagtcaatgacttaagggaggtggataattatataccaccatagccattatgaggggctcctgggcagggtgctctccaatccagagggagtctagctaggcatgggggtaacagggtgaggggttagagaaagagtgagaagcagggaagaagtggctctggttcttctctttagagatgtgcaagaaggaagacatatattccttgaactatcgaatttcataagtcaggagtacagagaagtaattaaatttgttatgcagtcttcttttaattcatggggtgtttcatcagaaagagagatatgactcaaggaattgcagctttgttgataccttctggtggcatcatttctagcctatgctggccttctgtaagccttttagggcttaattctcagatgggcaagtcactgctggtaatttattctttccttctgggcttgtattttacggtatttattgccctggaaggcttgataaggatttagctataataagacagcttcagtgcatactgttccctttgttactaaaataattagggggtctgaaatggtctgacacattccattgtggtgtttctaaaccacatccccagagactggggtttaacttaggaagagtgtcaagttagaaaatcataaaaatctggaaactgtaaagacagggtgttcctagacctcatcagactcccatcaccatgataccatcacaactgaaggctgaatgtaatgaattctggagacaacctaacttcacatgagaacagaaatatactcgccctccaagctaccggctttaccttttgaaaactttacccagtgggtggctgagcatgcccctttggccactggcttttacctcttttgggcttccttgttgatgaggtccatttctgaggttctcctgaacatctcttcctgaacccaatatccttggttacctggtcccagaatttcaggccggcacagttccttgcggttgcagcgctggtaaacagtgaccagacgtctgagacgagctgtgagggcggaggaaactggccagggcgatttgtctgggtcggagccatcctgggcttcaaacatcagtgaggatattagtatttacaaacagaactaaaacaggagtgactgtcttttggttttgtttaaataaaaacaaagctgactcaataatttactcaaagtagttactgttttaataattggcccaggagcaaggcatgactggaagggctgcaattttgccttggatacagcttatgttgtggtcaattaattctgttatctctcaaacacagaagtgtctttttgtggtggcagaagttatgtgaggactttgctctaaagcacaggaatgagcagatcctttgttgcctgcaccttccaattaccaaagctcctctcacgtctgaattcagaaaattcaaaaaccaaaccaaactaaaccaacccccacaacctttctttaaaaaaaaaaacaaaaaaaacaaaaaaaacccgatgtcatcacaattcctttttacctctcagaccttattctaactgaagatattaacatttacttcactttcaaattttaatgccaggtagaggaagccagagccatgctgaagctccatgtgtgactctaggggagtttgatgatggtcaacttacttggctttttaaaagagcctccttaaaaaactacttattaattacatataaactccacgataactaacaaactaagaccttactttcctatgccttcagaaggacatagtctcacctgcccggctgtcatccttcttttcgctaaaaacgccatcacctccatcactggaactctcctagggataaataaagccatcccatcagcaaaactgcagcttagaagaaaccagctcagaaagtcttgaaacggaaagagtaagcatcacgcataagagctgtcccctgcccatgaacaactcagaccaagataggacctgataaagcttacttctgtacaatcttaaaagagccagaaagcagtttatttaaaataagttttttttttcttttcctggaaccatgtggaatgcttctgcctgtagagaatcggcttgagcaatgatgaactggcacgctctctctggcaattacattttacaagtactattttagttgtgaatttaaatatttgccttaccatcgtcacttgcaatttaatactgtcatttcatttcacaaaggttgtgcctgcatttctgttcttttgctgtgaaaaagtgtcatgctcatgttcattatggttagcttacttcacagcaacagacactattttcataaaacactactgctccagacatgaaacctgatggcgcaaaaccccaggaatttaaaattaaaatcatgacttgagctctaagtgaatctggagtaatatcacaagcactgagcttgcccaagtcggtgtatgtgtcaaaccagctttaatgaattccttcgcaaatccttcttggtctcaggaatggaactttaaaaactcctcatatgtaattcaggtgggaatctgaggggtaacagaagtgactgtgctatttttcaactggactctaatttcaacactaaaacttactatattttgactagcatcttttgacctgaatgacagtacagaacaacctcaggattcaagactttgctattttagagcacagggtcagaaagaagggtcagcaaactgcggcctgcagactttctgtgtggccctcaagctaagaatggttcttacgtttttaaagggtgaaaaaaagggaggaagaatatgcaacagaagccatatatggccttctagcccagggtatttactatctggtcctttacttgctacttcctggaatacacaacatggtagaccagtaatctagtatggtaggaaaggagacacccatgactgccaacagtgaaaattcaaaatgctcttttgggcccctgatacgacgcaaagaacaggagcccattttctgaatgaatttctctcttacgcagaacagcgttaacagctaatattacggagaactacgtgttaagcattgcacaaaaccttttacatggctcatctcacttagttatcagcactgtctcatgagatagaaaccattactatgctcattttacagatgcagaaaacaagccctagaaatgttcagtaacttgcccaaggtcacacagctggcaagtggcagagctgggattcaaatacaggtaatctgatttgagagccaacactttcaactaacaagctgtctaaaaaaggacaagagagtcttagatgaaaatttgtcttggagagtgaaaacatatttataacagaagtggggaacactagctaacctcctttgcctgggccagaattgtctcctgttatctaatgttaatgaagagtgaaaacccagggctgatctactgtaccattttgaagtggcagttaaatataccattttatcttatactactatttaggcagttaaaaaaacaacctactatgccttatataatttcctgccagagaggactttttaaatatccccacagtatctgtgaagatcctttgaatgctgaaatgtataagtgtagtacttccagctgagaaatgctctacagtctacacaacacaggtggcaggccccagagctaccatgttccttcgtgccatgtagtggtggctgacatgggcatcatcataccccaagtccatgacaacaggctcccagcttggtgtgaggcaggcatacagcaaatgctagcttcccttccagtccacctagtagtttctgttggtacagttagtaaacatgaatagttttaggcaaaactttcaagtaaggaaagctttgagcattcatagtgtttttctgttcctgtcctctcttgaaggtacttcctctctctagaaatgacagaatgaagaagacctagtttgttagtagctcaagtgaaaaagatgtcagacttttagttaataatccgtttaatgtgagtgtgtgtgaggtgctgtagcagtgacagtcctgagcatgcagaggccctgcatctgaactatgtagtctaatgtgtgctacctcaatttctgcttacatgattaacttgaaagaaatgttcatcttcaaagaggtatgaatcatctcacagagaagggccccagagtgctgacaagaatgtcaacaacacagcaaactgattggttacaatgtgcaatttctccatcttgaggacacacgtggtttggagtcccatgatccactgctctctggtctcgggcaagttgttttgatctctctcaagctcatttcttcttttgcaaaatggagaatggcataaacttcaggtggaaagcagatatacctcaaatgccattaacacaatattcaaggattttattatggaaagactgcagaatgtagaaaaagaagagggcaggggagatagcactcttgtgtcccctggctgtatggcttttttgcagctgattaaaactgagctccctcgtctctacaatgggcataagaataatgcctaacagatggggaaatatgctttgtaagtgtgaaagtatacacaaatactagtatttgagttcacagaaccctcaaactcctaactcacaagaagaaggtgcttgttcagttcctaattaaacttttggaacaatggaatttggccattttaggcattaaattttcctgcaagttcttggccatgacttcatccttttatgtactgacctcatggtttagagagcacctgagatgtcacagccacctacggtaggaactgtggcacagcacggacatgcatgcttttgacagcataactacaatgatgaaaattgtgctgttacttattgctatttctgttaaaagatgtgttactctccccacatactggctgtgatagagaaagattttgtttacaatttcaggctccagaccattccaacccaaatatactttcagactaactgctttagaaggtttctgtaggttcactgaatctggctgcacgtgacatctgtaatgatttgccaatcaaaagtgctactggtattaaaacagagggtgggggaagctgtaacttagatcatttcaaatctcccttcaaattctaacattctatgactctctgaacgccacattttaagaggacaacaaccatagtgtgctctggaaggcgctggaatagcaaagggtctggatatgatatgatatggaaaaatatagaggaactagaggtatttcacctgaaaagaaatttaaagaaattaaggtcatgagctggtctcagcaatttaaaattctatcagagaggggaaaaacaacagttttgttctttgtagtaccataaagaaagctagatggaacccatggaaccagctgggaggcagatttctggtgtggtaaaaagaagtatcatccaacaataaaatagacttctttggaaggtggcatgttcctcttgttttccccatgaactcccccctgacagccccgctaaagagggaacgccacactgagaccactcaggcttgtgccagggctccttgcaatgctaagactctaccaatctactaaacggttgcctttctatgcctaggtctgttgaattcaggggaactgctctaatgaacaggctctttttatacaatgctttgggcttctttaactctgcctgaggacagagctgggagaaagaaacacccaaacagtgtcttcagtgcaggaggtagggagcaagcgtgaagcagggtgggcagcaggcctggctcagatgccggccatccctctatgtgtgtgtggttttagcatgcagactagaagtaaaggtgaatccgtttataatctgtccacctcagaatctggggaaatccactccccatttcaactgcttttaatgatattctataccccaggttttaaggatatgaagagcaaatcataaatgtgttaattttgtaaatgaatacaaaagtaattccagagtttaactctaatatataagagcgcttaagttatttttattgattctgccatggccctccagtgtcctcctaattgattagctaagcatgtccagtttaatgtcagtggctttcagaggctggcctcttcatatgagctactgctgggaggaaggggcataaacccacacctgaattactctctattgtctggactacgaaaagaatacttgactacaacaaagaataccggaatatctagagaattacaagtcttagctctgtgatctagtggttgtgagaatttggtcaagtcctttaactttcagggagggcctaaagtttcctcagccctcaaatgaagacagggtgaggtgaggatcaacttaaataaatggagtaactggtttgaaaagagtcaagttccatatgagaataaggtattatgttcatttctttggtacttgagttgtttctacagggaaaacgcatcccaaattccagacaaaagcaataatataaactaaggactggaacagcagaacatgaatttttttttttttttttttttttgagatgaagtctagctctgtcgcccaggctggagtgtggtggctcgatcttggctcactgcaacctctgcctcagcctcctgagtagctgggagtacaggcgcatgccaccacacctggctaattttttatatttttagtagagacagggtttcaccatgttgaccaggctggtctcgaacttctgacctcgtgatccacccgcctcagcctcccaaaggctgggattacaggcatgagccactgcgcctggcccagaacatggatttgaattgtcaagatgagaacctaacttccttcatgttaccggggtctgaggcttcatgctgatttgcttcaatccactgcttctcaaaccttgaggacacagggaaatgcatctttgaaaaattattattatctattttaagaaagggatgaagccattgttactgttacaggggtcagagctgatggaggccaaagtaaataaataccatacattctgcaagctagaatcaacagaagagaatggaaaataatggataatttttgggtagtgatcaggagaagaagagggaggaccctcgcaggggagtcacttggggacaatgctacagtaacttctgggatccagaatccataacattctctctattactcaatgctagagaaaatttggtcatatggtgctggggcccaggtagggtttcagtctacttatgcaaaatctcagaaactcattttaaaaatgcaatacagactgccgcttctgggatgcatttccctattctttaagtataattaaaccctctggatagtaaatatgaaacaagcataagaaaactctgaaaggtgaaaaaaagaaaggacaaactagagacctcaggactcaaggaatgacatgatgaaaaaacatgctttttttttttttttgcttcatatatcctagatttggaggtaaagaagcgggctacccggaaatggcagaggcagacaaaaaaggccctcaaaaaaaaccttccgggcgcggtggctcacgcctgtaatcccagcacttttggaggccaaggcgggtggatcacctgaggtcaggagttcgagaccagcctggccaacatggtgaaactctgtctctactaaaaatacaaaatattagctgggcatggtggcatatgcctgtagtcccagctacttgggaggctgaggcaggagaatcacttgaagctgggaggtggagattgcagggagccaagatcatgccattgcactccaacctgggcagcaagagtaaaactccgtctcaaaaaaaaaaaaaaaaaaagaagcgaggtggcttcctgctctctctagttaaggactaggaagaggtaggttagcaggttagggacacagaaaatattaagacaataactgctataccccagcccaacaatgcagaagaaactgtctcaactctacccatggcaacaacggctgagtgggagctcagacttctactttttccaggtggtaatagggtaccccattcccttgctgggctggtatcagaaaaagctaagcaggaagtcaggactttcaaccctgacaagtagtaatgaggttccccacccctacccatggtggagctaaacttccattcctgctcaaagtaatgagaaacatcccctttaggggttaatgggagcagactgggaacatgaatttttgcttccacctcacagaaacaaggtgccccccccgacctctgttcccctgccaagaaaggtgctgaaagagaacgtttaaataagatccagagtctcacaatacaatgtccaaaatgtccaggttccaataaaagatcacataccaagaaccaagaagacctcaaactgaatgaaaaaaagacaaaagtggccaatgctgagaggaaagatcttagaatgatctgacataagaatttaacagtcatcagtgagccattctgaacatggcccactgttcagaatgaaacagtgaaatgaaatgaaacagaaagtttcagcaaagaaacaaagatccaaataatatttggattcaaagggaaattttaggtttgaaaagtacaataaactggaacaaaaaccaaaaccaaaaatgaaaacccaaaaccctcaggagaagactcaacagcagaatggtggaggaaaataatcagtgacctcaaagacagaaaaatggaaagtacccaatgtgaataacagaaaaaaaaaaaaaatggacagagccttagagacccacaggtctataacacaagatctaattttcattttattggtttcccagaaggcgaggagaaagaggacagggcagaagaaatacttgaagaaatcatggctgagaatgcttcacatttagcaaaagacagaaatcagatttaagaagacgagtgaattccaaatagggtaaactcacagaaatccgtaagcacataaaatcataaacttctgaaaactaaagacaaagaaaaaatcttgaaagcatcaagagagaaaagacacattaccaataggggaaaaactgcttgaatgacagatttctcatcagaaaccatggaggccagaagcaagcggcagtaccttaagagctgaaagaaaaaaactatcaacccagaatcctccatttggtgaaaatatcctttgggaacaaaggggatattaagacattctcagatgaagaaaaactaagagaaccgtctgacagttctctagactaccttaaaagaagagctaaagagatttctctaaaaagaaagaaaacaataaaagaaggaaccttggaacaccaggaagaaaaagaacacagtaaaaaaaatatgggtaaatatagcatattttccttctcctcttgagttttctaagtgatgtttgacagttgaggcaaaaattttaacattacctgataagaaatggttaagacaactatattataaatggaagagggtaaaggaacaaaaatggaagtaaggtttccacacttcacttaagctgataaaatgatagcattagtagacggtgatacattacatataaatatatgaaacacctagaagcattaaaaagctacaaaaataaagataaatcagaataaaatcatacaaaatactcatgtaaaccagaggaaggcaggaaaaataaaaaatcagggaaaacaaagagaagacaataaaatgacaggcttaagctttaatgtatcaataattacattaagtgtaaatggtctgaataatatcaactagaagacagagaccggcagagcgtattaaagattatgatctacctgtatgctatctataggaaactcacttcaaatacaataaaggcaggttaaaagtaaaataataaaaaagttatatttatgcaaacattaatcaagggaaagtagccatattaatttatcagataaagtacccttcagagcaaagaaaattatcagagtcaagagaaagacattatatagtgataacagggtcaatctgccaagaacatgtaattctctctatacatttttttgagacagaatctcgctctgctgcccaggctggagtgcagtggcgtgatcatggctcgctgcaacctctgcctcccgggttcaagtggttctcatgcctcagcctcctgagtagctgggattacaggcatgcaccaccacgcctggctaattttgtatttttcgtagagatggggtttcaccatgttggtcaggctggtctcaaacccctggcctccagtgatctgccttctttggcctcccaaagtgctgggactacaggcatgagtcaccgcgcctggcaagaacatataattctaaatgtgtatgcaccaaccagagctgcaaaatatatgaagcaaaaactgatagagctgaaaggagacataaataaatccacaattatagttggaggcttcaatattcttctctcaacaactgatgaaacgactagacagataatcagcaaggatacagaaaaactcaacaacatcattgaccaacaggacctagtcaacatttatgaaatactgcatccaataaaaccaaaagcatgttctttccaagtgcccatggaacatataccaagatataccatacactgggccataaaacaaacttaacaaatttaaaacaactgaaatcatatagaatgtgttctctgattataacagaatcaaactagagatcaataacagcaaggtaatggggaaatctccaaacacttggacactaaataataaacacctaaataattcatggaaagtctcaagggaaattaaaaaaaaatacattaaactgaatgaaagtgaaaatacaacacaaaattaatgaaacataactaaagcaatgccgagggaaatttacagcactaaatgcatatattagacaaacagaaaagtttcaaatcaataacaaagaaactcccacctcaaaaacctagaaaagggctgggcacaatggctcatgcctgtaattccagctctttgggaggccggggagggaggattgcttgaactcaggagttcaatactagcctgggcaacagcaagaccctgtctctacaaaaaaacagaaaaatagaaaaaattagctaggtgtggtggtatgcacctgtggtccctactacttgggaggctgagctgggagcatcacttgagcctgggaggttgaggctttagtgagctatgattgcatcaccacactccagtctaggtgaaagagtgagaccctgagtcaaaaaaaaaaaaaaaaaaagtaaatgcagaggtatatacagtaagattcagtactgtaaaaactcaatgaagatgtcaattctccccaaagagatataaaggtttaaagcaatgcctatcaaaatcccagcaacagtttctgtggataagattattctaacatttatatggaaaggcaaaggaacaagaaaagcaaaaacaattttgaaaaagaagaaaaaagtgggaggtatctatctatcaaattttaaaacttacggtattgctacggcactcaggattatgtgctactgacagaggaaaagacaaatagatatatggaaaagagcagagaactcagaaatagaacccacaaatatgccaaactgatttttaattttttttaattttttaattttttgtagagacaaggtctcaccatgttgcccaggctagtcttgaactcctgggctcaagggatcctccctaaaaagagacacttacagggtgggagaaaatacttgcaaactacgtatctgacaaaagactagtatctagaatatatacagaactctagaaaatcaacactaaaacaatgaaattagaatataggcaagagacataaacatttcactgaaaaggatatacagatggcaattaaacacataaaagatcttcaacatcatttagccatcagggaaatgcaaattaaaatcacaacaaggtattgctacacacctaccagaatggctcaagaaaataatagtgaccacaccaaatgttggtgtggatggagaatacagagaaagcggatctctcatgcattgctaatgggaatgtaaaatggtacagccactctggaaaacaatttggcaatttcttaaaaaacacaacatgtaactatcatatgacccagcaattacactcctgggcatttattccagagaaatgaaaatgtatgttcacacaaaaatctatatgcaaatatttacagaggacttaatagtcaaaaactggaaacaacccatatgcccttcagtggatgaatggttgaacaaactctggttcttccataccactgaatactactcagcagtgaaaaggaatgaactgttgatacagacaaccacctagatgaatcccagggaacttttctgcatgaaaaagccaatccccaaagtttacatactgtatgattccatttacagaacattcttaaaatgacgaaatcataaaaaatagagaacagatgagtggttgccaggaatttaaagaggggtgaaggcagaaggaagaggatgtggttataagacagcaacaggatgaatctttgtggtcatgagaatgtcctgtatcttgactctatccatatcagtatcctggttgtgatattgtactacaatactgcaagacgccactacgaggggaaactggataaaaggtatatgcgatttctgtattatattttgtgactgcttctgaaatatacagttatctcaaaataaaaagtttaattagaataaaaatgcaattgcagtctgtgtattttaagtttttataataaaatgttgggcaaaatgcaatgtaactgtagtaatgcaatcaagttcccccagatcactaccaagatagggatttctttcttaatatgaaagacggtgtaaatgaccaatactgcacatttgactcaccgtttgtttctggaggccatctactttgtcctcagcattgtcttctttatctgtgttgcctctaaataaaagtaaaaaaaggcatcacatactacctaggtcccccttatccacagtttcagttaccctggtcaaccacagtccaaaaatactaagatattttgggggagagacagggcgagagagagagatcacattcacattacttttattacagtatattgttataattgttctattattattgttgttaatcccttactgtccctaatttataaattaaactttatcataggtatgtttatataggagaaaatacagtttatacagggtttggtactatctgaaatttcaggtatcctccatgaataaagtggaacttccaagtcagccgtctgtacccatggaggattggttctcagatcctcagggataccaatatcggcagatgatcaagtcccttggttggccctctggatctgagagttctgcatccacagacaaggagggctgacaatagatcccttcttctgaaggcattccaagccttagtttttccctcccttgtgggagaattcaagagacactgagaatgagagaaactatcaccaaacagttatcacttctacaggcaaggacctttattcaactgagactgcagcatgaggctccagcctcacgtctactcaggcaagttcagaaaaaggtaattcctgcccatcaagagtcatctgaacatgtgactctgataaaagaacacactctagaaactgaaggctgtgcacatcaaatgaggcctaatgttgcaactccctggtcacagtaggatgaatcttcccacagaatcacatttggcgaaagtcactccttggcttggaagggagctctgctgccactggttaacaaggacattttccccttgttaccatcagacccttgatgctagctcagctgcctaatgtcttctcttttgtgagcttaactactgctgatgcctacctgtttttcatgattcttttaaaaactgactttgagggtgggtgcagtggctcacacctgtaatcccagcccttagggaggctgaggtgggcggatcacctgaggtcaggagttcgagaccagcctggccaacatggtgaaaccccgtctctactaaaaatacaaaaattagccaggcgtggtggtgggtgcctgtaatcccagctacttgggaggctgaggcaggagaattgcttgaaactgggaggtggaggctgcaatgagccgagatcattccactgcactccagcccgggtgaaagagtgagactccatcacaaacaaacaaaaaacccccaaaaaactgcctttgaaatatttgcgtcccaaatattcttgtccttgatgctcaagtcctagaggcaagataagctccttgctttaccacttaaccgtagaaagaaaagccaccccacaaaaaatagcctttatgccacattcaggcgcccattcagagagtgttttccctgaatcagtgaatgaacatgagaatcaccagtcatatgggcctctgttaacatctcccagaatgcatctcggttatctgtcctcaagaaaaatgctggggcagctgaagtgttcatcaggggttaaggacagatggaaaatgcactgcacacttttcttggcctgagcaaatagttaggggctcctggcagtgccacattctcaggtctggccacagacctgggcaatgcaaagcagtatctgctacttttggggagaaactaagagataaatgctaagagataaatgctatgttttggccgggtgtggtggctcacgcctgtaatcccagtactttgggaggctgaggtgggtggatcacaaggtcaggggttcaaaaccagcctggccaacatggtgaaaccccatctctactaaaaacacaaaaatcagctgggcatggtggcacgtgcctgtagttccagctactcaggaggctgaggcagaagaattgcttgaacctgggaggcggaggttgcagtgagccaagattgcgccactgcactcctgcctgggtgacaaagcaagactctatctcgggaaaaaaaaaaaagctatgttttcaaaaacatatatataatttgaagaactacaatttttagctgtttagttttcctatgtatttatgtcaagagtaaataaaaatcagtcaaaggagaggccttccatctacttttttgcacacagtccatggacaagctgaaatgtcatggccgtcaaggagcggcccctaaatccatcttgctcatggactatgcaatccttagacaatactggatctgaggaactgcagttcaaagtcaggaaggctgtacttgtttctgttcttagctattctgccaggcatgggaggtctgaattctcccacaggaatcctctgaccagacaagggatggacatggttagaaagctgggcaggcttttagaaaggtgggcagcctgggaaactcatgaggaacaggaaccggtatttggttcaaagtgcttggaagtcaaagagcaggtctgaggtagagtagggtgtaaccaaagtagcaattatggaaaacagcggcagtgtggcaaggtgtagggagatgccagatgctgaggaagagataaagagtgctgggtttatgaggaaggggtcacagatcagtggcatggcatgtcacatgagggctggcctacgtggcttctcacctttcaggaatgtctgaggtcccatctgtaacaccctgttctgcagaaagggacttctcatcgggcatcccaactttctccaggaagcaaagtgctgggtctgctcgcatggcattgtacctttcataacctgatcaagagtggtgagaaatgccagaagtcatgttagaactcacaatatttgctttgggcactagtctttttgttttccttatttagtaaagaacaaaacaaacacaaaaaaataattatttaagattaatgagatcctataagactatcagggaaaaatcctggtgctaaagcggacacctttgagtagtgtttgaccaacaaacaatggcttacggaaatactcagtgtccgtgaaaagacaattgtatagatacacaattctgtttgctgcttcccgtcagctggttttgcaacttcttcccccatcctcaactctggataccttgttatatcctttatgggccttgttttcttacagctcatttttatcccatgtgttagaaagggaaggtgaacatgatggatggcaggactgaaatataaagagaactacgatgattgtttattgcattaagacagacctgtggcctctgtatcacaaactcagtacaaatcttaatccacactggccagggctttggaattactcctcatcacaccccaaagttaacaacagacagtgttttgacccagaagaggggcctcaaaaaggaagcaaaacaattttaaaaaccctgattttgtttgataaagtccatgtgtgaggatttattttattgaacctaatgtactcttagaatgagacagcatttggccacataaaaggcagagtccccatcagaggagatggaagagctgagtgtaaatgagaaccagcctggctcttaggaacaaacctgatttaactgtgtttggtatttcatttctattttggtttttgttctcgtatcactgttgatgcagttgtatccttcaagctgtaggtagcacctggttcttttccctgaggagctgtgggtagctgatcttttaatccacagtggctctcctgccatctccatgacaggtgctgcccacatgaggtacctggcacgagaagctctgcagtgccttatgttctttactcacttactccttatggcaatgacttgattgctctaagtctctcatgaggtcgtgagcttcctaggagcagaacctgtatctgtttttgctcatcattatatagtcagtacctagcaaagggcctgacactgtacagactcaacaaacaactgaccagatgagtcggttttgcctagattcttttctcttccaatcactgttgtaggaagaagaaccactctcaccctttccccacgttcctgccccacctcacatcaaacagaaaattccccaatactcctgcttttaaggaggttccagtcagtttctccacctgcttctcatgaagagaggggtaatttaaatgacaggtgagatggtgaaatccttcccttactgtccccttactactgagggaggccaactgtccaggagtataccaccttcacactctgtgctcaggcatggagcaagctgcgaccctccctgacctgggcaagcttctattctgtagactttctcttgtcatgtgtggatctgaagcctagagacagattcagtatttttatttctcaattagctgtgaagctggaggtgaggaagaatgactctttcagtcccctagaaaaccctaacaactgtcctgaagagaagccagtaggagctgcaacagcaatacaaagacaaagagcaacgtgacagacccatgagggggtgtcggctgcctgcctcttttcacttttagtctataagctgctctctaagaatatcaacagaaatactaaagtctgtatgtcaaggaaaatttcacacatccaggctaccttggaggggcagcagtcactcaactcaactgagctgtcaagagcataatttagaataggtttgccacagaaatctttttgctgcaggctaaagctccaaccaaaaactaagccaatgctaatggggtcagcttggagatcgatctatggctatattcaactcatttaacagggttacagcaggctatgtctggagtggactaaaagatccacaatcccaggcatggtggctcatgcctgtaataccagcactttaggaggctgaggcaagaggattgttttgagtccaggagttcgagcccagcctggtctgggcaacatatgagatcccctctctacaaaaaattaaaaaaaaaaaaattagccaggcatggtggtgtgcacctgtagccccagctacttgggaggctgaggtggacagatcacctgaacctgggagttcaaggctacagtgagctgtgatcacaccactgtactccagcctgagtgacagagtgagaccctgtctcttaaaaaaaattcacaaaacctcagtcaatgaacagtcatgtgtttcttaacaaagaaaatggttgcagctctacagctcatacttaaccaaggcatgcaggtgaagtggagcgggcttcctgacacaatatccctgaaaagtgaacactagacagactggctttctgaaaatggctaagtatcacatctccagagctgctgagtatctgagaagctgtcacctggtaagacatgttgtgtgggcttggttatactgtgataagggcgaaggttagaaaggggtggtcagatgtgttacctagatgaggacatgtctaagcctaagctcatggaataggcagcacccaggcaggggcaggatctgatatggactctggcgggtgccaaagaggatgggcccatgaggcatctgtccaacctcatctaagttgactccaatgtaaccatccaactaaactgatctggccctatgcagagtctgcatttatggcttaggctcagtctcctagcactgaaaacagaggctttttcttctcttgtctttatagcattatctgctaaactcatcctgtacaatgagacacttcagacactgcacaaatcaccttcaaggcctctgcccctcagctgtaactgtaaattccaagttcacctcaactgacaatctgtgagaatctgaatggaattgagtgatgaagtgtcatcttaacatctcacaggtgtgatcagcaaacacaaattaatttatactccccaaaactgcttcaacgagcagaagaatttgggagcgaccttatgtatcatctgggctgactctatctccaatatgagactaagagatcaactgattaatcccaataccctgaacagtgattagggattaggaaactagaaggtagggcaccaataataacctgtcttttccaggtgagaaggcatcttggacctccttagattcctgtccatttttacacattctaaggctatgtccttcacgtgagaattattaattatatcttcctggtgagttgtatctatcatcattgtgtaatgaccccctttcttccaaattatgctttttgcctcacagactgtgtgtgatattgatttgccttaccgggttgttagtattttctggggatgtcttgtttcacctcttggatgtcaacctcactctgtcctctaagtctcatcttctctttcatgtcttcatcttctttatcactcagggatctgtttctttagctctgctttcttggaccacagagctttttcttgcttccctttcctggaggggcagccctttcaaagtcatgttttccatttctgtgggtattaaaaacccagtccttctggttcactgtcatattggcccctaagctttcagttctggctttaaatgacttctgcatttggggacttcccttatttcttccaagtcctgatccaccttggttttctgtatgtctatggtgggtgtgttggggtgggggaggaagaagtagcagcatgtaaattctacctgccatacttctgggacttcagatgtgttctcttttctcagcatgttgttgccatgcagggacttggcaatgtgccctaaaaccaccactgaaatgagactcagggtcactaggccttcccccacaaaccaaattcagatgctctggaatctggctgcctttagcagcctactgtcttctggggtccttccaaaactaggttaaaccaagtctgggttgcactgcggtaccttgtgactaacagggagatcacgcacttccttctactttggagctgagttctatccctgcactgtccaacagaggagccactagctacatggggctatttaaatttaaattaattaaaagtacataaaaatacacttgctcagttacattagtcacattttaagtgctcaatagccacacagggctagtggcttccacagcagacagtgcagaattagggcatgtctatgattgcatgtagttctaccggacagcaccgctttagcctaaccccggcggtttgacaaagggttctcagcagcactgcaccacctgaagcctgcattctcaataccagtatccaagttttgagtggattccaaattaaaatatgtataggcatggttgttacttaaatatagctggttagcctgtaaaagttgaagaattccctttaaagaatacgtattagaaagttaacaaccttccaaaggcagagtaatatgggagagtggaatagcacccagcacctattatgtaccaagcactgttctaggtggtctacatttaatgtaatatttaatctttaaacaacccctaggtaggctgttttgatactatacctcctccattgtataagtgagaaaataagagaagcttatgacttgcccaatgtcacacattttagtaagtagtggagttgatagctaaagccaggtatacctaactcttttcactttaaaccttgctcctcattttaaaatttctgttgattcacctggcagggaaagtgtgtatcaggcatactatgggtgactatcacttgacactttcatcattcattttaatggctggcagttggctgaaagcaagggcagttgtttcaaacactgccagaggtgaagaaagggagcacttacttcagtttttccaagtgtttaaaaaacctctcagtcccctttagtggctcaattaccacatttttaaaaagacagtctatgctatcttctatgcttagtttttaaaatgccagtggggtaaaagatacacactaggaagatgtagattatcgagaatgaccttataattctgcatatataagaaatgctgaaacttagcatttcccgccatttatttactccttcattcaaggtgtctactatgtgccatgcactgggactattagaggcagtcccatatccgacagcatggacaggcgagggaggaagatatacaccaaacaggttctttgtggcctgaatgttcctcaataatataaaattcgcagtattattgtgagccatacattcatctggtggaaattccaagagggcagctgtgaagctctactttttaagatgaatgtgtaacagaatgatagagttttgcaggaacatgccgagcttagttggaggggctgaactcatccttcctgggggaaactgatacagaagggaacgccttcagagaaatacacaccatgcttgaacacgccaatgagaagtgacttatcggcttcagcatcccaccagtccactgggatctccatgtagtcgatgtcaggcagaggtacatccagctccctagggaaggaagggtgtagactcaaaacaacacaaaagctactggtccaaccctggtattaggccacagtcctactggcatgctgagatgctaaagtaacaataaacaaaagggttaggaaggctgtgggtcattgtttctcaaccagggctttgcatgagaatcacttaggcagtgatttaagcataagtacttgatttccaggctctacctttgacagactgacacagtcttgaagcacctcttggagaacgcaatgtcagttggtccagggtggcatcttgggatccatatgtatagagttctaatgtgcaccttatgtgaaccacagcaaaggccattgatatattggacatctgaaggtagagcttccccaagagttgaattcatacatgattgtatgtttaaaatagtgcccaaatcatcgtggctcagtatgttgcctcaacaagtagagatcttacgcaccatttaagaccaagagtccacactggaacaagtcggtatatcaggagggcctttcagagggtaagtgccataacaggtggcacctcctggcagtggtctattagatcaaaattgatcaaaaactgcattgttcctggccaaagggatgcacataactcaccccagggcacagacatgcaggtgttagcccctctctgagtttctgtaacgtgtttggagagctcacataaaccctaagttcactgtcttcattcatctgagtacagtcctcgctctttaaggctttgaggtttagggaatagcatgcatctggatggcttctccctccccctccagctgcctctgaagtttcttcttccgtcagactcttactgtgacacaggaccgaatgctccctactagtcccagctccctctgtggggatagtgtttcctgacccccacctttccagggatccatggctctgcctgcccagtgccatggctgaatgacttttatgggatgaactgctgttcatgcctcatggcaacttctccacaagaaggtattcaacctgaagagcagcagtaagagacagaggaacgcagaggaaggaagagggtgggcagcagacttactctctctgtgttctacctagctaccacctatgacttcctacacatgacagcggtaagttcagagtacttctgccaggtaacacttgatggatattatcaggtggaattctgctgcatttatacgactcaaattgaacctgtctaccaaacacacaacctccccatccctgctggaaattacaatagtgactctgaaaggcatagaaagtggtaacagttgctgaggagcctggctctgattacaagttgccccatgggtcgggttgtctatgtccctctctctcttactttagtgctcctatgacctctacagacactagcattgctcaatggaaagcaagagaaagaagaaaccacggccccaggtaatctcaacacaaagtccaaatatcagcactcttggtattctgtaggaatgacaggtgtgcacagggctagcaaactgcacctggtgatcccatttataaactggggctttctgacagctttattaagtggaagctgagaacctggtagcctcaatcttggaaatcttgggatactcccacaggattctatagctttccaaacactaatttgcaaaactaacatgcaacaaaatgaataggccgcacatattattaatatgattagcaaataaagaaaatatgtatatgagtactaaggcaaagaacaggatggtgggtaaaacttccagtctatacatgtcagatcagtaaccgacactcgttctacagtaaatgactgttttaaaagaaaatttataacacttttgagggaaataaaatgaactaactcaccaaaagctaggtttctaagaaatggttttctcctttattttatttgtagatgacctgatgaattgtccttattctacttgcctgttctcccatctgggacaccggtcctgggcagggggtaggaggaacatgggcctctttaagcacaggcaagtttggccagctccatgaataggcattttatgtcaattctttaacgttgatatgttaagtttcatttgctttacctggcaggagatccttcaaatgctttctcagctgcttctcccagtatttcagcttttaggtagtacagcatccggactcgcaaaagtactctatgaaaggtgaacacattaatgcaaacaaattagaacccataactgtctgtgaaccacatccccaagttaacactgggaaattctgggcattcccatgtagttaatattatgaagtaatagaagagaaggcactagaaaaacaaaacattatggcagacattattatgatcattcctattttacaaaaaaaaatgaccacatcagttatctgttagatcatcctgtgagccacaggaggcagcaggaacagacagctcttctcatctttaagagtactcaccccttccatgtggccacagtgacctcttaggcagaggtggcttccgagaggccagctactgaagagtgagcagggtgaacagtggtgttttcaaacagtttcacttgtacacagttaaatgaataaatgaataaaggcaagtgtctatttttcgtggcaatatgtcttctcttctgaggtgctcaattcatttttattctgtatggaccacactcaggctccaagggaatgcatcaaacatgtctcagacaaagcaattaagcaagtatttgctgggcaactactatatgctctgcatcatgccgggtgctataggtatataacaaaagtaatgcctttcgccatcggatgacccttgcccacaagccgttatcgtgctcttgggcatcccggcctgcagagtcatgagccaatacccagtctgtggtattctgttatagcagcagaaaatggactatgacaaaggggtaaggcctctgagaaagcatcatttctacctattagatctgggtagaaagtgccactgtgggctcaagttgtaggtggaaacacacaaagttagaacttatagattggaaagaacccttattatctctggtataacatttctcatctcagctgtcaatcaactcaaataattctgagagtatttttttttttttttgagatggagttttgctcttgtcgcccaggctggagtgcaatggcgcgatcttggctcactgcaacctccccctcctgggttcaagcggttctcctgcctcagcctcccgagtagctgggattacaggtgcccaccaccacattcggctaattttttatatttttagtagagatggggtttcaccatgttggccaggctggtcttgaactcctgatctcaggtgattcacccgccccggcctcccaaagtgctgggattataggcgtgaaccactgcacccaacctgtttgtttatttatttatttttaaagcccagagaataagaactcttaaaaatttacaaccactgccaatccttaatttgtagatggtcgtagctgtcagctttagtaaaaagtggaacagaatgtcagagtcctgcctgctgagacttagctcaattagagtagggctttcctgaaaatgtctgtctccctaagacagggagagctgtttccatttctataaagagaaacaaatgtgttgacgtctaacaatatctgcagcatgagagaacagaattgaaagccaatagtattcaattctcctccaaatggaagggaaatcaattcagaggatggatggacaattccttatagccagccccctcctccaagctggtgtctgaactcaaagggacacacaactgcagcaggtttgtaacacccttggtttagccaaagaaaacaatccattaatattttgggtggcgacatatccttttttctttttaaaagtattttactgatgtgaaatatacttccataatgtgcacactgcaaacatgtatagcttaatgaattcctacaaacaaaacatacatgtgtattcagcatctagatcaggaagcagaatattctccctgaagtccccttggtattcccttacagttacatcccatccccagtggataaccattatcctgtctgcttttagcttagatttgaagcagtgctttttaactttttaaaggttcttttgatgacaatttcatgcctaaaataatatagtactaataataacaacactttgagtgcttactgctgtctctgaagagcttgtacttttgtgtacattagtttttattacagtattgggcatgagacttatcttcaaatatttgaggtgatcaagggaaaggattatactttatctgtaaaagaaaaaaaacaaaacaaaacaccccacaacccaacaactacaaaatcattaagaagatgttatagggagacgggaaaacccaagcaaaagctcttaacctataaagtaataaactcttgattaccagaggtgtgcgaccggaggccctcacactgcctaccaggaatgctgggaagataactcttgcatgaccttgacatgaattagatcatttccaagggtcagatacattgcacagtggtgcaaatatccacatgcaaacttgccattgttttgtcgctgaatgccccaagtccccaagactaaactaaatatgaacaaagttttgtttttcaatcagttttttttttttttgctgtctccatcccacccgaccccagctgttagcctacagatacaaagcatactatctcaaatgcatgcctatcaaataactgaaggccatgaatggcaacagcaaactggaagaggtggctgagagtggcagcgaccaaggccacaatgttctgcccttgttaatgtgacctcaggggcagaggatgacctgactggtttttgagagtcaaaatagaaaaatcctcaggggtatatacaatgcagtggcagaggggccaggttctgcgggagagcagaggtactgttaaaggagttataggagctgtaacatgaattctgagccagcttagaccacagataacacatcctgtctttctagaccttgcacagaagtagcacaagagcatgaagtgctctccctgtggggttcccaggaatcgaagcagtctgagccgggctgccaccagggtatggggaggagggacactcacttgttgcagtgctgtttgaggtgtttcttatagccatcatcatgcaagaccacctcggggttgcaggtggctagccaatctgcatcctttagctctgggattagcaactggttcttcgtcttcttccccttcctccctctggggactggggcagataagcctgaaacagaaagacagcatagggcaagtggatagccaaggggggtgttacacacgggttttagaagagctgggctggggtttgttagaacagagttgggctgtgctctggatggcagaccctactccttagcccacaggtggtggtggtaggaaggaaggccatgcacttggtctcctccttagtaaacaaataaactccaggaccatttagtttgtcagtaagatttcccaagtaccctgtgaggattaagaaaggtgtaacataacctgtgccctttgggaacttacaacctggctgggagaaaaggaacatttgacctaaaacttcaaggggagccttagccaaggatagggaaggaatgtagcacaagaaaaggcacagacagaggtgggacagggacaggatggtgaaatgcaaaaggcaagtcactgtgcatccctaattcagagggggagtctgtgtgagactcaggttagtgggcaggaccagatgtgggaaactttaagagggtccagttgtacttcaacaaaatatcacaggtaacactgggagattctgaggcagaaacgaaagcaacatcttttcccactggtaacattctgaaaaacacccgagaaagagaagtcccccaaagcacagcaatacggccccgcagaggaagaggggatgaagtgcatgggaatcgtgcttcttaggcatggccctgccacctctcacctgagtggttctggagggtctgggcttgcccatctttggtaggtgtgatcagttcccaaatgaaactcttgatcttctcgtcccccttataatgcttgacacagtacaccaggagggcacggcaaatcatctccatgtccttctcgttcagatgccacttgaatcggccatgagtcaggatgtccttccaccggccccagctgacagtggacatacagacaggtgttggagggagaatggaccaggccatgcaggcagcctccccacaggaggagaaacaagagccatacatgctttttgttctctgtaggtctgttaatcatcccaagggctttgtcccgaaaggcctttgaggaccacctgactgtagcacaccgaatatcactaaagtgacctggacgttggacactgagagcttcatatggccactacaatgttaaaaagggagggaccaaactactgggagcagggaataaatttggaatcaaaaagagtccaacagcactattcaaaagcaatgatgagctcatggcagctgaacctttgatttctaccagagccaaagccctgcacgaatcatgccttggcgataacatgtgttgtgtggactccttgtatatccttgcggggtgggaggaagcaggaaatcagtaccagacagcaaattaggaccagagatttgttgtgacaggcatatgagaaaatcatggcatgtctgcattgtggttgcggagcatacggtgactgagacggattctgggcagaaggcacagttctctcttgctccaacagatccccctttgccctataattccaaaggtgactggagagacatcctagacaaatctcagggactgaaaaacagaggggaacaaacaacaataacaacaaaactaagcagagccaatacccacccaaagatgagcaggttcttctctacccggaagcactccgctcggaggtagcgcctggctttgtcattgaggcgcctggatctcgtgggcctttcgtctgagtcgctgtctaactctgaaaactccatgagctcgtcttcctcaaacgagttgtagtgtttggtctgctttctcacgcgaggtcggtcgatcactaagctttcctagaaatggagaggactactgggaagaaagtcctcttttctctactcctttcacaaagcataagtgtatcctcaggacacatttgggatagaaccatgccccgtctcatcctccagcacgaagggctattcccagcacacctgctgtctccatgaccacaggacaagcagagaagattctctgggacttgctcaagttgatgtgctccctggcccccagtgctgcttgtcaccatctgttgtttctgcagtcattctacccggggtgtgggcaggcaaggcccccccccagtgaccaaagtggtgtcggctctagccaagaaagactggagtagtgaagacccagctgttctgcccagcatgcagagagcagtctgcactctggagacaagacaagctagagaattccatctgctcagcaactttctgaagacaaacgcatattcctgctttatttatctgccttcgactggttctatccactaaccttttgcctttcactgacaataccatctccagctcaggagcctcggtcattctgatggttcccctggctatgtgtcttctctagtctccattgcttcctgctcctcactccttcccccatacctcttccccaagccaggccagcctcctgactactcctccacacagcccagataacaaatgtcgtgttatccctgctctgatcaccgtgcttcccaacacggaaggctccaactgcttctgcctggctacagggccacagtgctttctccccttgcttggacccagtgtcctgcacacacagtagcttcttgattgcgacactgtgaaacacttagaacaggttactaaaggggactgcaggatcttcttaaaagaggaaaatcagcatttctatttataggagaaaagagggtggattaagcaacctgtggtcgttctggctgggtgctggttactgaattagctagctacaagcagggactgtctcctggctttgtggaaccatgagagttcaatactcacctgagaagacactcatcctgaagtgaggtgacagggtcagagatgaaggacgggaaatcaacatttaaggggtgcctcacagtgggctgggcactggtgccagttatacccacaaatgttaccttgtaaccccacagtgtgggcctgaccacctcctcttctactaatctcagcgggggtcaaaagcttcatccgaaggcatactctggtttcactctcaagtccattctctttctcatgttcagaattaagaaaacatgagacactgaaagaatggaggtaaagccaacaaacttttgtcatgctttttccctctattatgtgtgaagtttctctcacagaaagtgttgaaatacaaataaaatagtcacatgccagggatagaatgttggtttgaggcagaggcctgaacttgacctgtgtatccagttccagttctaattgccttcatctaatttcccaggtgcccaacagactgaatggccatttaaaaatgacaacagttaagatttattgagtgatgtctatgtgccaggcatattttaagcatggtacaaataccatttaagaaccaagactcaagagtaaataatgacttgagctgtgtaggaatttattgtcatgtatgacataagtgaatgttccatggaataaaatattattttgctgtaccttttcattctttgcttcagtgtctagttcagctattttagcccatttctgccaaaagttaggatcatctaaggaaatatctgttctgtttcctgaagccacaaagctagcctgtgaagaagacaagaattaataaactgtgcttgaacacaatacaaactaataaaacaccagtgttacttcaagagaaacctaagtatattatctatttgcattcaaaatcaaacccttaacagagcttccaaaatgaattgaaaatctcaaggctattctttttttaccttttattttaaaaattgggtgaggaaatcataatttcaactgaagggatcatttttttttggagcttaagcttggaagcaggaaggcaaaccccggaagacaatggcaatgtgacacttggtgtctagtttcctatgaaagagttaacacttaaaacttttctagatttttctttcagtgcaacagttaccaaatgtctgctatggaaaaggtattaggctgggcagtatgaggtgtagagacaagggatggttcacccatatcctccttataaaacactgaacgtcccactaaaaaactttcaggtgtcaccaaacaggagatttaatcaaacaggtcacaaagctcacacaggaatcagcagtggttgtggctagggaaacctgagagtgatctgctaagttttaaatccagtggcctaaacagcagagaaaagaggcacccagactagaagctgggaattttacgtaaaatctctttcccattaaacaaacaaacaaattgcttgagtttggggaatggagtgttcactggagcttccactctctatcagtgatcaagaagtgctctacaagggaatcaagatgtccactggaaggtttcagagcagtccttgcaaacagagccaactgagaataggagtgtttattctgtctgttaaagatcagctctcaaaggtgaggagtggtattttcttggtatagtccctgactccctattcagacttccttcctctaaggatctatatctttagatagtcacgcagactaaatgtgcagccaatttctaggatttgcattcagagaaacagaagccctgctaatgggtttcagagaataaacatttttttttctctcccacccccaacagctctggagagaaggccctgtaccttggcaaaagtggaccctttcccctcagactggatggtgatggtgtgcgttcgcctctgcagaatctggtctatgtcttcttcacagaacttggagccttcatcttcttcatccattaaggctccataagcacctttccggagtaggtcctccacctccatttttgagagctgctgtacctggacaggtcaccaaaggctactcacaaagtggaaaatgtataggagaaaaacagcctcaaatctggtttttgtgattcagtgcatagttcctccatgaactacatgttagaacaaaggacgtgggcaacaaacttcagctagtgaaatcccagatgcgatactctggggagggcaggcagacagtcctctataggcagctctgaaataaagctcagcacatgatccaaggtccctaacattcttcaggatgttggttattatcagatgtcacaagccactataactatgcatcattgaagatggtacttttgacatctttatattttagttagagcttgtatctttaaaaacctccagatgtaccaaacaagcagaagaacaatgatttattcattattaaataaatatgtatattagtattgtaaatgaggtcatttctcaactaaaaaaaaaatgatcccatgataaatgtgatcttctcaaaaaaaacaggaaatggggtcccaaacacccttttctggttctaattaagaatctggttctctttatatcaatcacaagagggaattccatgactctctgcatgactaacttgaagtattatacttagcaacatatgcatagctaagaggatatggaacatctggactaaagacaactcatttagaaggtttaagcatccaatctttgatgccctgagcccagagattaaggaaatattctgctttgtttgcctatactttaagatactttaggacaatttaagaatcttagctgtaattcttatgcccccaaagggggaaaaatattttaactgccttattttaagctgctaatttattcattcatttactgaccatccagcactttatgtttttaatatgccgagcactgttaggggccgaggggacatagataaaattggtcccagtacactctcaaagctcaaagtctgaggtatgagataaggcacagtaacaaatacaatgttaagatctactggcttctaacgggcacagttaaaaactctgtttactgaaatgttacaccaagctgggcaatcctacctcataactgcttctacggatttcctttaaccacccagaaaacacagacacctgactcttaacgatgccctgttgtagggaattacccaataatgatgtgagggctggctcaatgcagcgaaagtgaacccttaaacagctgtaagaagagaagcctgtctgggctgtgcgaccaatgttccttaagactccagagcaggcccatcacactcaccccattggtgccgccctttcggttgatgtcctgaagaacagccttgtccagccccagctttaggctggccttgtcaaacatctcgcgctcgtaggaatttcgagtgatgaggcgatacaccttcacagctttgctctggcctatgcggtgacatcgggcctgagcctgggaagaagaagagtcatatgcatcacgtcaccgtatgtataaacggcagcaaccctgggaataggggagtgcttaaatgtcatgtggtgtgagtggccaactctcggttacaagtaacaggactgatttcagaacagaatttatacccaaaggttggctgccaccctccgtggccactcatttcttctcccattgtgtactgactactgcgtgccagggataaagcaatgagaaggacatggtgtcccatcctgtgcccccgccctgctgtggtctgtgcaaggcaacttgtgagtggcacacattcccaggatgctgtcctgtcctcttggaagatatgcttcagagctggtagcactgaaaatttatttttaaaattttgctactgaaattttcaaacatagatcaaaatatagggaagtataatgacctcttacggacaatctcgtttatttttaccacactccaccctcccagattgttaggaagtaaataaatcctaagcatcatactgtttcattcttacatatttcaatacacatttctaaagatacaaactcttgtaaaatatatattattatcattgtcacacttaaaaacaactgcatttctgctgtgtcactgaacaggtacctttatttcctgtattttctctaaactaggagttctaccttggaacctgatcagcttaagatttgagcatctgaatgtacaccaagaggcagatggtatctggtcatctttcttttgaattgatgatcattgcctagatctgttaattcatcaggggctaccctaatgtacagttcatataggagggacaagctaaatatttgattctctttatttaatcagtttccaaaataacatcccaaaaagtgaccaatgaaattttttttattacttctttatgggatacaatgaaggcatgcacttaaatatatctgccatgttttactgcactgcagttattattcttattgctgttcacatttggctcatgggagcctctctaagttggctcctgagttccttcaacatgacctagtcaaatgtggaaaaaaggaagacgagaatcaactctgcagtatttgaatggactgaaggtatcagtatgaactcatggttaggtgtatatgtatatatacacacatatacatacacatactcacacagatatagaaataggtatggatatgtgtacatttatgtttgtatgttatatcaaagactggtagtctttcaatagttcccttgctttcaacatattccacactcctcttgtacatttcctgtccagacctggcttcagccattttgtttccagaagtcctagtctcttttagcgggaatgttttttctccctgagtaagcaagcagaggggtgattactgacactgagaggaagaggtggccatgccatgtgagtgagccctgcaggtatcactggacaccccaggtccttccttatcttggcccagagcagtaagacatgtggcccttgctcctctgtgagttagtggcagagcaagtctggagccttggacttctgctcctgccccgtgatcttgatcctggagtccagaattgcaagcaatgggtcccctgtgtcagaggccaggctgtttgagttggatttgaagttactgggcccagagaaaggggtaagtctaagcaggaatcctatgtttgcccataagggactcacccagtgccagaatccctggatatggaagcccccacccatgccctgcccacattcttcccctaacctcatggctgaaaatgacaccagaattcctatacttagtactaaagcggcccaaacactaagaagcccagtaagtactgggacagaagagaggccactggggcgggggtacaggaaatggccatcaaagcagggctaaaggagggtggatcccaggcacctcctgccacttggcccactgtgttacagaggtcctccttgcaataagaaagcttgaagttcatcttggtgcccaaaatttgcatatttctgtgatacgatttggctgtgtcaccatccaaatctcaacttgaatttatctcccagaattcccatgtgttgtgggagggagccagcggggaggtaactgaatcacgggggccagtctttccagtgctattctagtgatagttaatgagatctgatgtgtttatcagggatttctacttttgcttcttcctcatttttctcttgccgccgccatgtaagaacagcctttcgcctcttgccatgattctgaggcctccccagccatgtggaactgtaagtccaattaaacctttttttgttcccagttttggatatgcctttattagcagtatgaaaatgaactaatacagtaaattggtaccagtaaagcagggcgttgctgaaaagatacccgaaaacgcggaagcgactttggaactgggtaataggcagaggttggaacagtttggaaggttcagaagaagataaaatgtgggaaagcttggaacctcctacagacttgttcaatggctttgcccaaaatgctggcagagatatggacaataaggtccaggctgaagtggtctcagaaggagatgaggaacttgttgggaactagagcaaacgtgacttttgttacatttaagcaatgagaccagtggcatttgcccctgccctcgagatttgcggaactttgaacttgagaaggatgatttagggtatctggtgggagaaatttctaagcagcaaagcattcaaggggtgacttaggttctgttaaaaacattcagttttataagggaaggaaagaataaaaatttggaaaatttgcagcctgactatgcgatagaaaagaaaaatcaattttctggggagaaattcaagctggctacagaaatttgcataagtaacaagaagcctaatgttaatccccaagagcatgtggaaagtctttaggccatgtcagagaccttcatggcagcccctcccatcacaggctcggaggcctaggaggaaaaagtggttttgtgggctgggcccagggtccctgtgctgtgtgcagcctagggacttgttgccctgtcccaactgttccagccatggctgaaaggggccaatgtacagctcaggctgtggcttcagagggtgaaagcaccaaaccttggcagcttccacgtggtgttgagcctgagggtgcacagaagtcaagaattgagatttgggaacctccacttaaattttagatgtatgcaaatgcctggatgtccaagcaaaagtttgctgcagaggtggggtcctcatggagaacctctgctagagcagtgcggaagggaaatgtggggtcggagcccccacacagagtccctacttggtcactggctagtggagctgtgagaagaggggcaccatcctccagacccagaactgtagatccactgacagttcgcactgtgtgcctggagaagccacagacactcaatgccagcccaagaaagctgctgggggagggaggctgtaccctgcaaaggcacaggtgtggagctgcccaagactacctcttgcatcagcatgacctgaatgagagacctgaagtcaaaggagatcattttggagccttaaaatttcaatgctccggtggattttggacttccatgggccccctttgttttggccaatttctcccatttggaatggctgtatttacccaatacctgtatccaaatcatatctagaaagtaattaacttgcttttgattttacaggctcataggcagaagggacttgccttgtctcagatgagactttggactgtggacttttgggttaatgctgaatgagttaagactttcggggactgttgggaaggcatgaaatgtgaagacatgagatttggaggggccaggggcagagtgatatgatttggctgtgtccccatccaaatatcaacttgaattgtatctcccagaattcccacactgtgggagggactcagcagggaggtaactgaatcatgggggctggtcttttccatgcaattctcacgatagttaatgagtctcatgagatctgatgggctcatcaggggtttctgcttttgcttcttcctcattttctcttgccgcttccatgtaagaagagcctttcgcctcccgccatgattctgagtcctccccatccatgtggaactgtacgtccaattaaacttctttttcgtcccagtccccggtatgtctttatcagcagtgtgaaaatgaaccaatacatcctggtttaccaagttgttcttgggggcaggagggaaggcagaacttgttctccactgtcactttcttagactcaacaatcctggtcacttccggggagacccagaccccactgaggaaggagcacatagctggcaggcaagagcttatgtgtgaggccaccaagcatgggcaacagaacagaccctggggtctctgtgcacagcagggccaccaggaagaccagagcaaaggtcttcatagcatgggaaaaactaacttttcctctctcttgccaggctgcagggcaagtggctaagaaacagtccagccatagacaggggtagaaaacttacagacaacaatctggataccctagaggtggtccctgctactagggatgatcatggtttctagtgcctactcagtgggcaaatataggaagtgtttgtgtgtgtagagtgtatataaacatatgcatatataagacaaaatacatcatgaggtcatactgatatttttagttcaaattatgattgaagaattttagtttcatcaacctcacatctgtatttctttaatcatgttgaaaaactcaattttcaaccacatcaatatcagtactcatttgatttgtcccacaatataacattttcagaaaaccaataccattacaactcactcaaaacataattaccaaaaaatttcaagatttttctctccccagccacttagggatatatcctgctaagtatgtatagtgttttaaatacacacttgaaagtaggtttattttctgtagttgcaaggttagcaatcctgaaactactttctgtttaatctaggtttcagcaaatgagtaaagataccgggggtagcaggagtaagggctttcactgttggagaaggaaattataaatatggaaaggaggaaaactaaaataaactctgtggtgctagaatgaattggaggtatcagtattaactcatggttaggtgtacatgtgtatttatatacacacatacatatacataaaggtacagaaatagatacggatatgcatgtttacgtatgcatttgtgtctatacacacatatacaaatgaatgcatatatttacacatatgcatatttatagtctctctttctgtgtgtattccagctatgtccactgagagggcctagaagaaacatcattgcagtagcaatgaacacacccaactcctgaatcttgattgctaaaaaccattacctatacaacagagccacagtgtgctagagaaatggctaactgtagttagggctgtggtagagaaagtatagactaagcctgaaacatattactgtgtcagatgtaagaaattactcaaagaacgagggagacatatgagaataacacttaaagctcgaagagactcccactggctaagtctagaactatatgaacagaacatcgaaataaatatagtaacagattataactcactaaataaaaaaagaacccatgtattcatattgacataaaataaataaatgggagaaaaagggaacactcttccttatagtagaatgctaactaaccagtgcagagcgacagttagaaaatcatcactttgtaaccatcatagtgatgactgattcagccaaaaataatcaatggatgctaaaaccaatgggtgatactttgatgaggaacaggtacagttccaatttatttctccaaaattacttattattttcaaagggaaaaacagaaactttataagtggagaaatcggacagatatcactgtactaagtgatcaaagttaccatcatcagacaaatggacaccatgttattcctgatgtgatatattgagatggctgtgtcagttctgtagtagtactaaacctagatccaatcctgaggaaatacagacaaatccaaacggagggacaacctacaaaaaaactggccagtactcttcaaaaacttgaaggtcataaaataaaaagaaaaactgaggaactgatccagattaactaagactaaagggacatgacagctaaaggtaatgggtgaccctggattgaatcctggactggggaaatgacagctataaaatatgttgaaacaaatgataagacttgaatatgaactgtggattggagaatagtatttttatatcttgattctgagaactgaactgtgaatatacaagagaaagtccttgtacttagtgaaatacacactgaaagtatttaggggacaagggggtacaatgcctgcaacttactctcaaatagctcagacaaaaagtgatgtgtgtctatgcatgtactcagagaaagaaagggacagagacacaaaggagagagtgagaaagggcaaaaatgatagagtcgaggcaaaatgtaaacacagctggtgaatctggataaagggtacactggagttgcaaaatgaaattatatagaaataaaaatgtataaacatatgaaatacagacccttgaaataatccttttctgtgagttataagctattcacttgatacacagctagattcaattgtttcattttgcttttgagttttaggaattgatgtttccccctattaatttaaccacactgaagcaggtcgtgaagaaaataactaaactaagcaactttggcaaatagtattctgattatatactgtaatactaaagaccaaaaaacccactatagaccaacattatattctggtaaatgtatttttcacaaaatatgggttagcaattctaaaactacttgatgtgtatactaggatggaataaatgaataaatatactgtgttatgataacaaggtccaggcttcatcctgccagagaaagaagttacaaataaggaagaggaggagactataatgaaccctgtgatgctgcactgtaattagaaaattcactatggatgaatatatacagaataaatatagctgtgtggtatgagtgcttgcttaagtatgcatacatctgtttcctagctccatgtgcacagagggtctagaagcaataacaatctagtagcagtgggcatacctagtagccagagtttggtttctaaatgctgttctcaagtaaaagaaagcaaggatcgttggagaatggtcaattccaacgtgggggcacgaaaaatgtaacatggacttgaaccgtaaggaagcactcaaaaaacaatgggagcatgtcaaaaaaacacagaagccaatgtaaaggagctaccaacggccaaatctggacaacctgaaaacaaaataaatagagtaatggattataaaataaaacaaaatccacaagtcaatactgatataaataaatgggagacaaaggacaacttcgttataatagaattcttactaataaatgtagaagggatgatgagaatagaaaactaccattagctaaacaccatggtaataatttactgaaagcaagaaccattgatggaagctaaaattaatggacagaagtaggatgaaaaacaggatagagtctcaaaatattcactcagaagatactaatttttagagataaatacagttattttatggtggagaaacttggcagatggcacgttaaccaagtaatcaaagttacatcacgagtaataagatgtattcatatcacgcatcccctgatacaatgcactgaggaggacataatatgatttctatggtactcttgcctaaaatgcataacctcgtatctcaccataagaaaacatcaggcaaatacagactgagaacagtccacaaaacaactggtcagtacccttcaaaagtgtcaaggtcatgaaagataaggaaagacaaaggaattgtcacagactgcagaaggttagggagtcacaacttctaaatggaatgtggatactgggccagaaaaaaaatatttctaggaaactgaaggaatgaatatgaataaggtctgtagattagttaaagagtatcatatcaatgttgctttcttggtttcaatcattatactacggttatataaaatgtcaacattaagggaagctgggtgaactgtacattggaattctacataatttttgcaacttttaaaaaaggttaaaaaaattaattttgttttaataatgaagtaaaatgcttaaaatggttccaaagtcaaatacacaaaacagcatatttggaaaaaccagcttctttccctgtcccttccatcctgttctctaaaggtaaccatttaaaaacaaagtttgtaggccgggcgtggtgggtcacgactgtaatcccagcactttgggaggctgaggtgggtggatcacaaggtcaggagttcaagaccagcctggccaacatggtgaaaccctgtctctactaaaaatacaaaattagctgggcgtggtggcgcgtgcctgtaattccaactacttcggaggctgaggcaggagaattgcttgaacccaggaggtggaggttgcagtgagccgaggttgcgtcactgcactccagcctgggtaacacagcaagactccatcccaaaaaaacaaaaacaaaaacacacacagtttgttttagttttacccttggtagggaagggacagacaaagacacacagccttttaagataaatgctagcatacagtacaaattttttccaccttattttttttccccgcttaacaatatatccagggtacaatccagggtatagcaggatatagtgatagtcttcattcttttttcaaagctgaatatattacagtttattcaattagtcatctattgctgaacaattcagttgtgtagtctttagctattataattcgttgctggaccttctttctgtatctttagcggtagcaaatctctgctactgggaggtttgatgaatgattctgcaaattaaggaagtgatcatggtgaacaatatggtttatgagaccttcaagatagtaatcttatacggcccttaagtactgaccctgatttctttttctggctcatatggtgttgagggtaaattacaagagggagctgaaaagttctgagcaaaagatctgatggaggagccctgcagacactgctaatggccttcgtagcatccatctctttcttgctcactgccagaaccctgactcttgtacagggcagcaacattttcaaccgaaactactcccagcctcccagggatggccaggtaacacagtcctagacaatgaggtgtaacagaacctcctgaagatatgtgccaaagttctgctttcctgtaaaaaccaacatgcctgctttccttatttttcctttctgagatggaaccaagaggctgtaaaccacacatactgaggccagtggagcagaaagacaggaggaacccgggactccgatgacactatgatgtcacctcactagtcctcaactgcctacctctggacttgttaactgagaaaaataaacccctgtttgggagagccgaggccacaagcagctaaattacatagaaataaacatgttctcccccaagatgacttacctgaaggacaacaggataagtcccatcacatttaagagactcatcattttacagtcaaatctcaaaccattctttattttcctaagagaactcaataaaaaaaaacatgagatagagaaagaaacattcagaactagggccaggaactcagatgaagtccaagggaaatgcatcagcaaaggtatacatataaaaacctttggagtaaaacacaactagggggcagtggtgctataatcccccagccctaatccctggagaaaattatagtgctctaattatagtgctcacaatttcttctttattttttaatacatttggggtggacaaaagccaaagagaaatgaataacgacgttctgacaatgaaaaaaaaaaaaaaaaaaaaaaaaaggctgggtgttgtggctctcgcccatcttcccagcaccttgggagtctgaggcaggactgcttgaggccaggggtttgagaccagcctgggctgtcaacataacaagaccctctctggggttaaatctgtcagataagtcagtcaagaactagctgagaacaggaaggacagatgaattcacagaatgggaaaggggtgcttttgggcaacagaaaggagttaaaaaaaaaaaaaaaagaggacattgacaaggagaggcagcggcgtactcaaaaggaacgtgactcattctatttaggactggtgctgtgtaataagtgcctgtcccatcctgtgcttcagacgtgccgcctattcacatcccactctacatggtcatactctttgttttgtctggaatattcttccttcttatctcataattttagatccttttcattatttctgctcaaatgtcatcttcttaaagaagtcttcctagaccactctttctaaatcagggcaaccaactcctatcattcttttttttttttttttgggagatggagttttgctcttgttgcccaggctggagtgcaatggcatgatcttggctcagtgcaacctccacctcccaggttcaagcgattctcctgcctcagcctcccaagtagctgggattacaggtgcccatcccgacgcctggctaatttttgtatttttagtagagacagcatttcacgatattggccaggctggtcttgaactcctgacctcaggtgatctgcccgcctcggcctcccaaagtgctgggattacaggcatgagccaccgcgcccagccccaacttccatcattcttatccccttattttattttctttgcagtaaatactgcttatctgtaattatcttatttttcctcatttattgtctgcctatcctactgaaataaaactgtcagtctagctcaccagtgtctctccaatactttaagtaacacctggcatgtcccagtgatcaagagatagtcactgaataaatgactacatagtatagtatttgtgtatacatttacaaattattactttctcatagcaaagaagactcaacaggtgcaatcctccaaactccagacacacgtactgtcaagaaacaggggatgtaggtggggcgtggtggctcatgcctgtaatctcagcacttcgggaggctgaggtgggtggatcacttgagctcaggagttcaagaccagcctaggtaacatgttgaaacctcttctctacaaaaattacaaaaattagccaggcatggggctcatgactataactccagctattcaggaggctgaggtgggtggaggctgcggtgaactgacttcgagccactgcactctagcctggataacatagcgagatcctgtcttctgaaaacataaaattaggtaagaaatagggggtgcaagcaatgtggtggcagcagaggaagaggcacaggggtccaatacctcttcccctcggagcagtgtgggagtttcctgagtcctgcttctggcgattgtggaaagggcctgtctcctcactctggactcccaactgacttccaaaatcctgcagacatgcagcagctgcattatcttgtggctgtgctcttggccaggacatctgctcccacactttctgaattctgccttcagggaccttagcagcaggaaggacgcagaactgtgcagcccaccgttgttatcttgaaccctcttcaaccctaaggatctcttgcctccagatgcaaaaagtcccccagagaataagaagcagaagtatcacagaacaatggaagaggaaggtttgtggtctctgaggggagcatgatagcatgttattcccaagaggtctgcctttgccttcaggggtagcagcaacagtggcctactcctaagaagaaagaagacaaaaacccagtttttcctttgtctttccttctcaggctactgttatcgtcctgtgccacttcttaaccttaggtgttatgggaaacctagacaacacttgctgctgctgatgtgccaggactaaattagagcctctgtcttctaaatgatggtgagaaaaggcaaactgataaccttcaattttgtacacacattgatgcgaatacagacatattcaaggtttgagagagggtgtggcacttacctgactctagataagatctccccattaaggggacgtaaaaattggttttccttttaatagtccagataaaacagtaatattgctaagatctctcagtgctaactttaatctcttttgttattcctaagtagtacccagtttctatcctggatcctaatgaacctgtgccttcattttctggaaagcaagaggaggacaggaggatttgggaagaggaacacaatgatgtcagcgtcccagcctccacactctctctggagtaaatattctatatttatagcacgtgggtgcaagggcaaatgccaaggggcgtgggaatgtgtgtgtttgtgtggggagagtgcatcattctgtggacagtctccagccctcttgcttttggaaagccctcttgctctcttcctcatcacaccaagcaagcaagaaccttgctccatctctgtgggagacacagaatttggaccttcctctctctatcacatctttttatagcccaccagtcccactaactaatagccactcttctagtcccctgtcctaaaactgctctacatttctcaattccttcatctctacctagactggctagactttaaaaaaaaaaaaaggatgattccttccgagttgtacacatgttctctctcacacagtaaccttttgctgcattctccttacgaactcccaccctgcatcttccaccttggatcttcctcagtgctggtcttcttcgtttcttcattcaggctgagcattagaggaagttcagaaactgactcaacacactagtaaagttcacactatccaatttcagtttggacttcactgctattccttaattcatctcttgccagctccccagcagtggacattgagaacagctactccaaagcttctcccttcatccaagacccttattctggacagtcccacccaacttccctggttgctacacatataaatcagtcacctcagatgactttgccttctccactaggtttgactattcacgttcttgcttttcccatggcattgcacctattcaactggtaatgtgtagacttcacctaggtgaagcatggtcattccaaaatgtttgcctctggccatgagctgttgccagccccatgcttccactgatcctcctggatatcgcttcaggcatgtccagccgaggtgtcctcaaactggccattcaactttggtttcctgtgccactattcttccagctgccatgcctcacagtcaggtgagcatcacaaagaagccgagaactttgtaactgtcaaggacttaagaaatcatgttttggggttggcaaaaatctgaaaagggcctgatagtaaatattttaggttttgttggctatgaggtctctgttgcaactactcaattctgccactgtaacatgaaagcagccacagattatatacttacaaacgggtgtgattatattccaataaaactatttttaaaaacaggcagcaggccaaaaggcaatcattttccaccccttaatctgtataattgtcgtaagtaggttcttgatagtgagctgatcaaatattagtttttgcttattattattttagtgttgagtgtgttactcctttaaaaatgggttattcattacatccagcaactcatattcagccatcttttcaccagtagaaagatggtaagctagttataatcactggttttctttgagatcactggttttctttgaggttgcatgttgaacatagtttactttatgatgtataccatgaaatattttcagtttttttttttttgagaccgagtctcgctctgttgcccaggctggagtgcagtggcacaatctcggctcactgcaagctccgcctcgtgggttcatgccattctcctgccttagtctcccgagtagctgggattacaggcacccaccacgcctggctaatttttttttgtatttttagtagagacggggtttcactgtgttagtcaggatggtctcaatctcctgaccttgtgatccgcctgccttggcttcccaaagtgctgggattacaggcataagccaccgtgcccggccattattttcagagttttaaccatcactaacttaatttaaagcactagttttcaactagtaggctgctttcttcaaacacaagtttatgtggaaactcattaaatgaaaaagacaaagggccgggtgcagtggctgacacctctaatcccaccactttgggaggccgaggcgggcggatcacctgaggtcaggagttcaagaccggcatgcccaacatagcaaaatcccatctttactaaaaatacaaaaattagccaggcgtggtggcaggcccctgtaatcccagctacgcaggaggctgaggcaagaggcaagagaatcgcttgaacctggcaggcagaggttgcagtgagctgagattgccgcactgcattccaccctgggggaatggagtgagactctgtctcaaaaaaaaaaaaaaaagaaaggaatagacaaagcagcaactctgtaggagtgggtgggtagagaagaagcccagacacccattggcttagtgccctcttccctgcatcccttctcttgcagtatcccctagagtacctcttgaatcctgtcaaacagcagcctccaaacttcttttgatcaatcacctgtattatgaaaaaggttttgagccacccacccaccttcttcaccacatacccataatcctagtgttagtaaatatctcaagatatatgcgatatacacttaagatgaagttcttcattaatgataatggctgtaaatctatattccatattgtcttattgacaagttagaatctttttggctgacttcgcgtcccatatagttagaatgccattgtttttactttgaaacagggttgatgaagaactccaaactggaccctgccattttcttgcttgtttatgttagctttcaaaaaatatatcaactccaatctttgcagtaatcttttaaagccaccggttatttagtttggctaaaaccagaaaatagaatccataaagccacttaactggacacatataaactctaatgtgttgcactgtgtggagaacaaaggaactagtgaggctgccactgttgcccctgccacaccatggaactttcccacccctctgggttaactcgtttactgtacatgacacatgaccatcttaaccaacaaactgagtgaaaatgcccgaatcgtctacatatcaagaattagagcattagtcaagattagtatctttatttctgataataataataattagtagttctagtctatatctggaggctaccactgtgaaacatcatttgatttaacggaaagaaccacactctctaattagttggaagggtcgacatttacttttcattcagtttcaccccctgaccaaggccctaagcctgtcatccagctgacaccatagcatagagcatcacggatgctctgtagccaagccaggccctatcatgatgttctgggatccagggcagctaaggtaaacagcaatcatcctagtggttacctgcaagtcattttgtgggttccagtcagaatcaaatatgatgcaggtatcagcagctgtgagattgatccccaggcctcccgctctggtgcacagaagaaagacaaagcggtctgaatctggcttacagaaccggtcgatggctgcctggcgcaggtttccccgtactcgcccatcaattcgctcataggtgtatctgaggggacccaaatgaacgaaagcccaggcgttaatcatgacttcaatggagaacagcacaaaatgcaggaagctgtcgactgatggccttaaatccctcacttctaaatttggaccaaatgacagcagtctagaaggaatcctgccccctacatatgcagcagggcagacacttaaaactgtattgcaaaatgcccccctctcaaaacagaacaaaacaaaaaaacaaaacaaagcaaaaaaaaaccagctgtaaactaagaaggactagaagaattaaatcataaaataccgatccccatagcccaagcaacttattctctcaagtattcccagtttatacttaaatttaagcataagaccaggaaaaacaaacaaaagcctttcccatctactttgagtagtgctcacaaaaaggactcagagttttcatcagtttccagctactttagggtaaaccagaaatggtaagaagattaaactgtgaggcagtccttttatgtcacttctagcctaccaagttcctcaaagctttggaggtacacagcaaaacctccaagtttatagctgaaaccaaggtcttctggacagtagtacattgccaagcataaatcacaggaaaggtttttgaggtgtgtgtgtggggtgaaggaactgatgaatagttagaggaaaataaagtaggaaagtaaagctgagtatcattgagaaggcatacaactgtgtggaaaatcaagaaacaggggtggagtgcatggtagaggtaagggtaaaaggaaaaagaataagaaatgaaactgttaagggaacatattacccatgcccatctagagggaaaacagaagagacctttacgttggagatcatgggattaacacagaagatatagcagcaatctggacagctgctgggcgtcttattcttttcctatttacccctgacaacatatgaattaacaagggggatgttactctgggcccaattttgacccacaaacatgaactggttagtgaagcagaagtaataggaaacgtgtgagaaaagaaccaaatcaccccaaaccgacaacagccaagaccatgaatcctggcaaaatcctatcagcagcccagaatttgggaaatcagatctctaaaacttacataaataagcaggaagaaaataaggatagataacctaggggtagataattctgtgtgaggatggctttggaaaactaaatctggcaatatgatcttgacttccttgaagaaaagaaaaagccatgtaaagaaaccacccaaggaaatgtacatgaagaaacctgaccaactcagacttataagggacatgtataaagcaaagaaacaagtctgaaaatgctgtctcccttttataaagccacaatacaaccatacctaaaattaagggtacaattttttgtttcctctttatttaaaattataatacactcaagaataataaatgagaactacagcagcaaatgaaacaggcggtggtgataggattgtcatgaaggcagactaaaaagattttgtgtcatagacaaaggctaaggattagatgtctgaattctatagatttaattatcaccattattcctaacaaccacaataataatattagcagcaaattcttaagtgtcagttctgtgccaaaccctgtggtacatgcttggtacacatcattacatttaattctcacaatagtcctatgaggtagtttctattatcatcctcattttacacttaggaaacctaaaaacagaacaaaacaaaaattcatacaagtaacatatcttgctcagtcatctagctggttaagtgagttaaacccacatccatttgacttaaagctttcacactgtaccttacatttcaatgcagtaggacagaaaggttttcctaaacacttaagaagagaaatggagaatacataagggacactagtaaactttggaagcttgtaactctaacaggagatggaaacagaaactataactaggtatcaaaacatttttgataaatcagtgctcaggatctgtaacagttacagaagtttagccatgtatgtgatgcaatagaggaagcacaatacttggagtcaaaaacagggttgagattcaattaaagaacagccatttccccccctctaccctccaccaccaacacacatatgaatgattaatgctgcaggaaaagactccatgctctttgaaaaaacacccctagtcatcagagttagataccacatagatcagagtgaggctgggaattagcacagccttaagggggaggggaaatcaatacatagtgatgatacagctcagccatcacctagggaaaccgttcccataaaattagataagtgtttttgtgtattataatgtaacaacacttttagaacttttagaacaagatgaatggaataattctctatcacttgtttagttttgagggagtgctctcaaagaacacaaaacttaaaaaaaaattgaattatttgagctcctccctcacttttgagccagatcctctggccatgccctcattcctgtgtgagagtctggcatgaaattaaatgggaacaaaaccaaactgacagctggagaggcaaagaggctcaagaacaaagaaaaccttgagggctaataagtctgaatgaagaaatcagacatcataaaattttccacactgaacttcagcacagcaattaaccctctgtgacaactgtatttttaacaagatccctaggagttgatatggttcaaactgtaattctgagtcactatcaaatactatcaagtatcaacaagcagcaggtggcaccctggaaaaaacctctatgtgactggccaggagtagactgacatgtttttggcacaagaaatgttgactttagaaaggcctgaagggaaatgaacaactttctggtctcccagcaataatcaactggaaaacatgaagagttaatttaaaaaaagaaaaccaaaaaagcaaaacaaaacaaaaccaacaccaaaaaccattcacaacagttacaagcatataaaatacttaggatttaattcagtaagaaatatgaaggcttggtaacataacactaaggggccatgctttgttcaccattatgactgtaatacctacagaggttctagcacaatgcaaacactttacaaatatttactgagacaatagtgtatatgaaggacccaagttaagtgtagtgaaaagcatgttctttgattttgcaaagatgtcagtctaaaaaaataaagaaagaaagaaaaagaaaaaaaaaagctaaaaaaatcccaacacacgaatatatgtgtatatataaacatgtaaatgtgtatgtatgtatacatacatctatacatacacacacatttttctggagttaggggctggagcagacagagacagataaataagccaggtatggtggctcactcttgtaaccccagcaatttgggaggccaaggcgggaggatgacttgaggccaggagttcaagaagagcctgggcaacatagtgggacctcacctctacaaaaaagaaagaaaaatcagacaggcatggtggccaatgtgcctatcgtcctagctactcaggaggagtaggtgggaggattgcttgggcccatgagttcaaagttgcagtgagctatgatcacgccactgccctctagcttgggagacagagcaataccctgtctctaaatataaataaataaataaataaataattctgaagttcatctggaatattaaatatgcaaaggaataaaactactgatcaaaagactagaaaggctagacatttatccagtatacataatatctccctatatttcatagaattttatgagtcagggaaatagactattttactaaacagaaaattagaaaattcaatatatttggaaataaatgaaaataagacttcgattatatgccatttaccaaaattacagaagggctaaagacttaaatgaaaaaaaaatcaaataatccagttaaagattatgaatttaacatacacatttaattctttgatctctccaaacctctagtaaaatgacagtaaaggatgttttaaaaaggtataatcccttccccaattaaatccaccaaaagaacagaagtgataaaattctggcatctggaaagtcgtatttgatttgaagaaggcagaatcccaggcaagacacaacctaatttaatagtgcagaacacgtgacgggatcaaacattggtggcactaggtatccccgaaagcagggacgcagagtctaaaaacagggaaactggtggaatatttgctgaagtatttacttagcctctagatcacctaccccagccttgaagagggtaaaataaaagatcttgatcctctctactctagaagatactaaccacagttaaaagtgaatgtaccatgctgaaaaggggaaaagagacagagatagtgggagcccttactctttctcacccctcccccacaattagctctaaatacagtcaagtttccacctataggcaggggagagtaagaggaacaggacctcaaaatgctgatatagaagggtccccaatgaaaatggtccagccagatgcacagtgctcccatatggaaagtgaagtgcacagtcaacaagccttgctcacatactcagagcttctggttggctccacagtgcccccccatctgatggcctaagatatcagacatgaggctgatatgaaacacacagcctctgcttctggtaaggaggagcaaggtcctaacacaccaaccctctagcaaatgacaaattctggacaaactataaaaaccaaaatgaatgaacagaaaaacctacctgagggcactggcgagttaacaaaagcagacagatcttggagaagaatagaaatttgtggtttcagccagaggggaggccacaattatggtggcaaggtgttgatcagctgtaattgataaaagctgttgtctttctgacacacatcaggggaaggtacctagggcaactaagactgccagagagtgagaggggacccccagaaagcagagaaatagagatgggaaccccaaactctgggtataaactctgcccaagtttctggctgacttctgactcacacttgctcgggcctgattgtggtagtctgaaatgggaactactgtctaccagacacattgacagagtttgcactttgagcacaacctagttaactgcttccaaataaaacccatcaacatcttcagagcaatataacagaattctaaatctctagaacataatattcactagggctagggaaaaattcagttattctcattctcaagggaacaggcaattaacagatgtcaacgtcaaacctacaatgttataattcagacaagaactttaaagctgctattatgctgacgcttaatgaagtcaaggaatgttaagtaatgaataaaaagaaaagaaaactcagcagagaaacaaaacgttaataaacatagaaccaaatggaaattttagaactaataaataaagcatagagtgtgcttaataagcatgatggagatgataaagaaaagtcagtgaacttgaagacagataaaagagagagaaaaagggtttttaaaaaaacagagcccatggacttgtggggaattatctcaaggtcaaataaacaggtaattagtctcacaaataaccaagagaatggggcaaaaacaaaaaagaaattgaagaaataatgatcaaaagcttctcaaatttgatgaaagacatacatttacaaattcaagaagctcagtaagcaggatgaatcccaatgatcacagttaaactgctgaaaaccaaaaattaaaaagaaaatcttagaagtagccagaataaattaatgtattgcacacagggagcagcaatgtgaatgactgcagaacttttcataagaaaccacggggaccagggcacagtggactaacactgtaaagagctggagggggaagaaaaggaaaaaaaagtgaacctaaaattctaatatgaaagacagatacaaacaaatgggaaaaaatatgacttggagaaaacagatgaagataaaaaaattctatcctgataagccttagaaagacaggagaagacactgtacttgtgaaataaccagtgctattaaaaatggaaaaattacaaaaaatgttctgtgaaattaaaaaatataatgaaagataaagtcaagaaaattccccagcatctgaacttagatttcagatgggaaagatctatttagtatccagcaccaatgaagcagttcactgtaaaatttcataggactggggacaaagagaatacataaaaacttctaaaaagaacaaacataacacatacacagactaagaatcctacaggcttcgaacttctcaatggcaaccctggaagctagaagacagtggattaacaccttcaaaattctgtagggaaatgatttacaacctagaatctcaaatcctgcgaatagattccttaagaatgagagcagagtaaaacattttcagacaatgtctcaaaatttacttatcattcaccctttctcaggagctcctggaagaggtgctccaacatggaatccaccaacaagaagatctgatttaagaggaaaaaaaagaaagctgtcagcatgagaaacaaggcagatcacagctgacaactgtgtactctgtggggaacagcaacaggccagggaggaggaagtcaggaggccccagaaggtatggcctagagaagaggaaactgatgtgttggaacataaccagagatttagacaaccagggtaaagtttgctgctgaattataataggtgtatagaaaaataagcaatcaaaaagataatttttagtttcagagaaaataaaaactgtacaaaaatgaaaagtaaacagcacatgacataactcagctgtaatttcacattttcctaagtcataataaacaacaaatattaacctaactcaaagtattatgtggcatactgggaagatgagaggacaggaagttgtatacatgacggtatgaggagcagtgaaagaaggctaaacattcatcttccacagtgagaacggataatacctacaactgaaaaatatcaagaaattacaactaatatcattatttagatacagctataaataccaaaagaaatagcataaagagttgaaagtaaatgcttctgggatatgagaaactgggggaaggtagagagtgaattagcaaataatttttcattaagtgtaatagaatgatatggctctttaaattatgtgcacatacaactttaatgaaaataaaaactaaactaaaaagagaaaggcaatgataatattaaggccagaagaaccctgttggatgcagcttgggtgaagaagccataaacatgaaaagaagagctgggtatggtgatctatgcctataatccagctactcaggaggctgagatgggaggaccacttcagcctaggagtttgaggccacagtgaccgagccactgtacttcatcttaggtgacagagcgagacattgtctcagaaaaagaaaaaaaaatatatatatatatacacttcagaatatttatatgggtctcacggttaagatgagagagaagccttttaaagcacattaatttaagcttaagttcaggcctaaaaaaggatttaaagttgttttaagacaaagatttgactattataaaatttaggacatcaaaaaataaaataaatgaaaacccatactcataaataaaattaaagaacaaaaacaacactggggaaagtttttgcaacaaattcttataaataaacaaaaagtcaaagaccaagagaaaatgcatgaaaaacatgaatacacaatccacaaaaatgaaatataaataacaaatatgaaaaaatactcactctcattagtaatcacaattacaaattaaagagagaataattttgaattactggattagcaaagattaagaagtaaaaacaatattgatcagaatatggaaaaaagcattctcatatgatattttggaaaggaatataaataaaacactcttaactagagggcattttggaaatactgagtgtatcaaatgtttttaaaaatgtgcactgacatttatcctaaagaaataatgaaaacgttaagtactttaaagggatattcatttatagagtcccttaaaatgctgaaaaattggaaatgtttaaaatagagtatcacatagatcattaaaattttgttgtagaaaaataaagaaaaaaatttcataatatattaaataaaaaataagagttacaaagtgcaatgtagaacagcactgcaattcaaacaaacaataaagctaaacatatttatgcagaaaaaaacagactgagaagataacccccaagatgaatggggagttgtgcaggtggtagtgttacattatttccgcattttcaagagaaactacaatcttaagtaatttgaacacaaaatgagcaataaataataaagagaaaatagcataaaagagagctaaataaagacttctgtacttaccaaaagtctgttatatacacctttactcattttggggggttcttttttaaaaatctgcaaactaacagttgtacatattttaaagagtaagataatataagaagcaaatgctctggcaataggctcctaatctatagtgaattgaaagctacaaaactgctttgcaagttttgatttattcatgtaatacaagtctcaagaatcctttacatagaaatctctcctatagagctctgaggaattattttattgtctaatcagactttgaagaatcatttatgttacattaagtgtcagcatacccatagtttaatttgtcatttcttttaatcctcttgctataaagtacatgtaatgtacaagggcaaacagaatgttaaagaataagaacatctgttaagacacccgagatttgctatgaaaacaagattttctttagacttagcaatgcctaggctaccagtttctatgatcttgaaagtcttttatcattaagaatgaatttttaaaaactcatttgtcatcttcagatcattgatgtgtcacaatgacggaaaatctaaagtaatacacatgaggtaacaaatgtagtttccatacagaatccaaataacccacacagcaccacagactttttacttgcatgaggaatgtaacttagattcaaggaattctaagagtatgaacaagaaaataaattgggatgccatagccagtgcatcataaaaccttaagagggcttgctgagaaaggacataaaatatccccacattctttctctgtgagttgccagtttatgctctttcaggaatttgatatagtgatgatttccaggatatatttctttcaccattattaagcaacaaaaatgtaaatacattattttcttagccctttctaatgctatttgaattatttcctccaactaaagtgaatataaataaatatgtggaattttttttttaagcaaagcaaggactgtacatcataggtcatgaaatttactcttgacagttaaacttgggtccatttggtcataaaatttaactctgaatttcagtctatctttaaaaggagattcctttcctccgtttttgaatgttttgtgtttaaacaaaatttttgaatggatcaaaaaaatatcaaaggaaaggaactgtcccattgttgaatgcagagctttgacacaagtctcaccttctctggatgaggtaatcttctaggatgtcgaggcagcgcaccatctgggagaagatgagtactttgtggccacctgcaatcagcttagggagtagtttatcaatcaacacaagctttcctgctgcctgaatcatggcctgcagctgaaagtcaggggcatcagggctgtgggtttttcggaaatcttctagaattttctcctctgctcctgaaaaggaatggaacaaaactattcctcggacagaatataaggataaaggttgtactctgctttacagatcctgggaaaaatgaagtgaattcttaggtcctagaccagcagtccagtgaggagatgctgggtgcactctttggtctgtgccttcagcagagggctctgcagtggcagcaggagagaatgcgggtgctccactctcctgggaagtctcaccaagtagagagaggatctgagataccaagtcctaagctgactcacccaagtaaagaaaccttcccagacaagaaggactttcatacctcttgacatcacaaagactgtaagataatccaagccacattttgattttaaaatttctccaaaagtttcatagtaaaaaaaaatcctcccaacattttctctaactagtttggttaactgttaatttgtctacagagagttttaatctcattgcagcactttcactgattcaactaagtaacacatttccctgtccccaagtagaaagtgtgggccagactttgaacaaataaagggcagcaaactggtgagtgatatccatcttctgcccggcagagtacatgctgtgaggcagcttgttggcagaagttaagttcaaaccttggctcttggtccttagtagctataccacttaggcaaattcatcaagctctctgaatctcagttttatactctgtaaaaaggtgagaatgcgtacatcctagcatataatgaaaattcaatacatgagttatttgattatcattagcttctcgcagaggtcatggcagtcctgagttacttcctagtgcccctgactcaccattgatcaggtagggatggttacagcacttcctcagctccatcatggtgttgatgagattgggcatgttgtgctgatttgcccccttggtcaggaaggaaaagttcttctcgaggatggcacggtagtactttttctggatattggtcagttccacctcaatgatcgtctcttgtttgggagcaaggttcttttccacatcatctttcagccgccgaagcatcattggttttaggatagactgcagtttctttacctgtccagggaaatgagacctagttacctgcctcaatcccaagttaacgattactggggtattccaaccttcactctaatttcttgaacatttacccatagtactgtggtagtagactaaaagaaagattatgatcgacccctgaaaatggagagtttataatagtactgaaagggaataagggatatgattttaattcacaagcaattactgagaatctagtggcaatctcagaagataaaaagggagaaaggtataaaagagtacctattctctaggatggagaaaacatgtctctctgtcattctttctctaatacacacaccacatgcacagtaattacctgaagagtattttaaattatgttcggaggtatgagtgatatattacaaggaaacttagacgctgagagaatggagtaagaagtagagatgatctggaaaacaattcctcctataccttttaagtaacaatagcagcatacatgcttgggtgtagcagtatgtaaagaactaatgttataggtgacatctactctatcatggaatctgtcacatcaggggcactttaagtctgatggtgttctttgctacaatttgtctgttcttcccctaaaagcacaggcctggacagcagatctttatgcaactgactgcaccagcaaggtgacttgttccccctcccagtgagacaatgacagactgagggattcaaagtcaaagtacctgagttaacctggagctaaaacatgataccggtaagattaactctgatggtaaaacaaaataagggaagatgaaagtgcaaaagaaatcacgtttcaagtcagaaacggctgttcaaaaatttaaaaggggtagactctgcataaacaagttgtgtgctgcgagattgcttcctgaagaaatataaagtgatttacagagagtgatttagaagagttacttacaaaagcacattttagacaatgatgaacatgctttattttgcaaacagatgctttccagaacgtttatttactgtgttttaaaatacagacatctcatagagcagagattagagtagtggttaccagggactggggggtggggcggggtagggaggtattgttcaaaggatacaaaattttagttagacaagtggaataagttcaagagatctactgaacaacatggtgactacagttaataacaatgtacagtatttctgaagattgctgagagtggattttgaatgttctcacaaaaagcatgtgctaattagctctatttagccattccaccatgtatacatatttcaaaacatattgtacgtgataaatacatattttgtcgattaaaaaaataaagccaaaaaatttaaaattaaattgttatatataaatattaaaaagaagttttgatgtcatttttatggttttctcctacctaactccaatcttaatctttttatgagactttcatttttaccaaccaagggtacttagaaatcgaatcccccatatgggtaaggaattactatataagaacctaaagagaaaagacacagctagctgattgttaaagatagggacaaatgtcaatctgccacatgctgggttcagcttttgcccttctcttggttcataccttgaatcatttagagtttactatatgccagacattgtgctggtcaatacaacaaacacaacttgggagaagatgtgggccttgtcctcaaggagatcttttgtctaggaagaagaaaaaatgcataccacaaattaagtgcaatgggagaagaggatgcatttctaatggtccaaaaacggagagaaggttagagctggcttttgaaaatcaatagatagggcaaatgtaggaattaagtttgattattcactgctctgatgcaagcctgacttgcatcagaagtaggaagaaagagattggaaccccagggtgtacgcttgacatgtgggcaaaattcccaaaccttttcattcccctcattctttgccccaacccacttacacaccattgctggattaatttggcagagctaattatgtcattcctgtaataaggtcttgcatggcttctctgttacctactgaattcttcaaactacctttcaacatcttcccacaatataaccctaaacacttctgcttatattttccaattcatccactctgttttcagtttaatcagatgtttccccactagtgaataactaccatgactctgattatgctgggtttttttttttctatgcagagtggttaccacctcttctctccacacctgttaaaagctgcccatccctcaagatgcattttcaaattgtactctctccctagagtcttttctaattctcaaatagatgtaacctgtctctcctttgaaggaccacctctactatttgttcctcttatggcacgtacatttgtctgggttatttctataatccctagtggagattctataatccctagtagagtatttattactatcagttgttttttattagctttgagtccaacaaggtagacttggaactggaccttgaaaactgcagaaatgcagttgatctggacaaaagtggacttatcaactactccaggtatgtgactgccttcttttcctcactacctgtgtattgtgctgtatgcaagaagatgggcctgggaacaagttgcagattttgaagggaaaaggatgaaggatgagggaagcaaaagaaagcaccatgctcctgagaccagagctgtaagcaaaatcagcgaacgcacaatatgtgaaattagtgaagcaaggaggcccgatacaccaacataaaatattttgggcgcataagatattttgggtatggacccatctatcctctggggcaataagaactgctaataatcagcgtacccgccccaacatacacaaacacataaaataaaggaggtaacgctcattttaccaggaacgtgacaacttgctaaatcctggccccatagcatcctgctcttttcttgatgaagataacgatcacactgtctcctcaattctttgggtccctaattacctgctcctctgttttcagatctccaaattcctccaagaaagcggtctctgaaggaaactgtgatggctccagaaaatttaacaaactgaagagctcctccacagagttctgcaagggtgttccagtgagaagcactttatgttcctgcgcaaattaaacatacatgatggacagtgcttgagccatcaaaatagtgcattttcgtggggaaaattaagccagggcattgagtgctcaatttggggcaattctgatctgctttaatgaaaagataatatgccatcataggggtacagtcaataaacgaatcaaccttcctttcacatcactgattccagcagcacgttcatgttaattaaagcaactattcactcattcactaaatattattgagtgcctccccaccagatactgggcactgtgccaaggcagtaatgttaaaagggcatcatctttggtaccagttcatttaggggcctggaaaccagccaaaacaccttacatttccaagtcatatatttcatggtatttaagagtcctcctaagtctatggaaatcaatctgtggcaaaggtcaaattgttgacccagtttgtaaccaaaaaatcttaattcctatactattgcagttatagagaccaaaaaagaaaatctaatgtaaaacgactaggcagaaataagttacatgcagaatggctaaagagtgtttcctccaagctgaacaaaaggaacctgtgtttatgtaaagagatgctaactctcaccagggccataagctttagaccctccagaagtttgcagttcctattcttcagtctgtgggcttcatcaattatcacacagctccagtgaatcttcttcaactctgggcagtctgctaggatcatttcaaatgttgtgatgacgacgtggaacttgaagactcctgaaagggggtttccctgaggatgacacaaccaaagtcaaagctttacaccatggctatagaattctgctaatatctgctggactacaggaggcagcactacagatgctggggcctaggtgagaagacaagcactgcttttcctcatgtgagaaaagagaatataagaattaacgagctagttagccagaaggcctcacaccatcaatgaaacagaagcgagacaacatctgccctcacaaaggtgagaaggatgggcaatatggaaggcacagcaagggagcatttttatttattagctgtcatgataaggaaatcagataggtgttgttcacaagtccccagccaggagtccatctaaaccatgcatagtttgaatgcccaaaggaaactctctgctatttttcagacttaatttcaccttataatttgagttctagcacagattgaaggtaatgattctgatgcacctaagacaagcgctactaggcaggacacagctttgtttttcagactgtcttggtgttgccatcacatttcaagagcagagctgcatcatgttagagcacttcttaaatgtcttccaagtgtctctgctgtttttgaaacctctggagagaccactggctttcctctgattgaaatcgtttaatttttaccttaattataaaaaccaatgtgcaggacaaacacacaactatattcagctaagtgacagcacttaaaaacttaaagagaaaatgttgctgttgggtttctaatgatttgaaacctattttctctttatccttctctgtcaaatctgttaacctcctctccaaactccctggctgggaatccattctctgtatagtaattcttttgctcactttcttcactgaacacataacaattcagataaaatcttctgcatataaaagtaacttcataaaccaataagtaagtcaaactttcagtgtcctaaaaaaggtatatctcagagtttagacagcatgccctacaatcctgtgttgtatcataaattaaaacgagctaccagggagagcaggagtcagccttgacaaacatattacaaagtcattccacattaatacaagatgcagggcactggaacttctgaagataagtgacagaaaggctgttctgagcttaggcagtccctgggtctctgatctcacgtgaggctcacctgggcgtctctgtacaccatttcatactgctggatcatctgcctgctgatctggctgccgtggtacacaatggcattcatctctgtccatgtccggaactcccgctcccagttagtgatggtggagagaggggcgataatgagaaaagggccgtggattcctctcagaaatatttctgaaaggaatgtgatggactggatggttttccctaggcccatctcatcagccaaaatacagttttttctgcagagagtgagaaatataggtaattcattatcaatataggaaacttatagaggctggttataacttgaaaagatgcttcacatacctgtaagattatcattgaaggctttatcatcatttcacatattaaactgaggttagttattattattattcctactttgcctacttccaaaacagaaccatgctaatttgggagaaaatacagtcatgtgtcacttaaggatggggtcacactccgagaaacgcatcactgcgtgactgtttcattgtgggaacatcatagagtgtacctactaaacctagatggtatagcctactacatacctaggctatgtggtatatagcctatggcttctaggctataagcctatacagcatgtcattgcagtgaataccgtaggcaattgtaacaccatagtaagtatttgtgtatctaaacatgtctaaacacagaaaaggcaaagtaaaaatagagcaaaatatagattaaaagtggtatacctggccaggcgcggtggctcacacctgtaatcccaacattttgggaggccaacgcgggcagatcacctgaggtcaggagttcgagacgaacctggccaacatggtgaaaccccatctctattaaaaatacaaaaactagcagggcgaggtggcaagtgcctgtaatcccagctactagggaggcagaggcagaagaatcgtttgaacccaggaggcggaggttgcagagagctgagatcacaccattgcactccagcatgggtgacagagcgaggctctgtctcaacaaaaataaaaaataaaaaaataaaatggtatacctaggtgataggttgacaggtgcagcaaaccaccatggcacacatttacctatgtaacaaacctgcatatctggcacatgtaccctagaactaaaaaataaacattaaaaaacaaaaacaaaaaaggtatacctatacaggggacttaccatgaatggagcttataggactggaagttgctctgggtgagtgagtgagtgagtggtgggtgatgtgaaggccgaggacattaccgcacaccactgtagacattataaatactgtacactaaggctacactcaatttatttaaaaatattttttcttcaataataaattaaccctagcttactgtaacttttttactgatgaacttccaattttttaaaaaactttttgactcttaagtgttattacaaagagtcaagaagttttaaaatatttaaaagtttttgtatagctgtatattcccatatatatatatatatattcctataaatatatatatatattttttggttttgttttgttttgttttttgtttttttggttaaggatttagaaatagaaaacagctttaaaggatattctggattttgtttcatctagattgagcccacccttttggtgtggctggccaaaaaaaaaaggcacaaagtcagtgatgtctaaagatcattccttttggttggagaaacagctgacaaaaataaagtaagtcttggatgattaatgtgcaaagactaccaccctaaattgatggccatgctgctccctctcaccagtctgctactgcgactctaggtgttccaggctaaggcaataatatacctctgggtacaaacatctgggctggttttggttccttacctgttataccagttaaaaagaagccagttcatcccttccagctggtactcccggagctggttactgttcttatactcgcgagacttctcaagtttctgccaggagtctgaagcaggccgctcctagggaggaaagcaaacagcataatagatagagaatgatgttttaggagcataacatggatactaacgaggacagtggtaaatctcactgtcccaaggctggtttcaaactatagttattaccttctgagtaacgtataggttgggggaactaagtaggagtcaggctgagagaatggttaggaatcctgattgcttctagataataacttacaattagcttcagaatgaaactctccctgctttctatctggtccgtcactgcattacaccacacaccacaattagcctggtgctgtatttatttatccatgcacacacatgcttcttccattagactgtgagctcctgagggcagggcctgtaccttgtttcttaccatatctcacacaagaatcaacctacagcaaatgcttaatagatgactgacaagttgaattaaaagcagaaaacagtatttatgggagagggttgaaagaataataatcaaccatgcaaacaaaacactattaactatgtaagtttctaatcacagttctgcatctcgagacacctctatctacctttcatatgccaaagaaaacaaaaacaaaacactgctcttgaatggactcctacagggacctaagtttaatgttccgagtatcaaccttccagtgatgtaaaagcaagaaataatattaataaggaactggataacagtttttcatataaaaatggcaatgtttttttaaacagaaactgatcattccagcctatagccatattctttaacaactgattctcttttcaagttagttacaccttaataaagctctgggctgggtgtggtggctcacgccaaagtaatcccagcactttgggaggccaagacaggcggatcacctgaagtcaggagttcaagacgagcttaacatggtgaaacaccatctctgctaaaaacatacaaaaattagccaggcgtggtggcacacgcttgtattcctagctactcaggagtccaaggcaggagaattgcttgaactcgggagatggaggttgcagtgagctgagattgtgccactgcactccagcaacagaccaagactccatctcaaaataaaaaaataaataaaagctctgatcccaactcccctccttttaattgttggataatctatatacttctcaggcgccctgggagatcttggcagttgagtggtaataatccagaatcagaaaaacaaataaattcaataatgtttatcaaaaacctatgttctctctgtgggagtcacagggatctgcagataaaggacagttcttccacttaataatattccagttgagtgaagaagggaaaatcaaagaaaagaggtagctgatgaagagataagaaacaggaaagatactactgagcttctcttgcacaccagccattacttacaaattttattttactgactccatacaacagccgcacaccaagaaatctaagccaatatcaaagcttcttaaatgtcacatacatcaaaatagacctgagacctaaaggtgacaagggcgctgggaaagttcgatctggggtggaaaacactgaattgagggttcaatgagaagtaacaaaggtaaaataccacagaaaccacctaggaacaagccaggtggacttccatgattgcaaagttcataaaattacatgttccgagaagtgccagagagagacaaaactactttaccacatgcttaatttcagggagaacttgaagagattcaaattctttaacttttgcaggatctacatcttcctctagctcccacgtgctttcttcatatggtagtgagcaccacttcaccaggtaatgtgttacctcctggtgggaaaacaggaaagaaacttaatgttctattaggttaaaggagtcagtagtatctgccaacctctgaaaaaccaccctacgtgactagacaggaataccactaagacaagggtcacatgttaaaacaagtgaaatacgtggaaagaagggaagatgcttcaggagaggcaaatacccacctcccctgtttctgcatccttggtgtgggccacctccaagatgcgatcaacttctacatagtctggattgaacaagtcttcatcaggctaacacaaacagaggagaacagttaggaagtatgtccccttgcctcaaatccaacacctagggtgttatctctaagtgatccctactctaggccctatcaacaaacacaaaaagaaagggtttgcttaagaataaaagtcacggcatttattcactgtctccaaatcctgctctccatgactaaatttaaaggatctaaccatcttagtggctacaccctagccaggtaataattccctgttggtcattatagcaatgtacaaaaatcagcagaagggttcccttttccttactggtccttatttcaaacacagcccttggcaactaggaattacagtttctttttcttaataacaacaatagttaacactggcagggggcatgagggaagcttcctgggtgctgacaatgttctatttgctgatctaggtagtagttacacaaatgtgtttacattgtaaaaattcattgagatgtatacttttatctttatgcacactatgcttcaaaaaaagtttactacaaaacaacaagaagcaacatatagaaatacttaaggtatgtccagagtaatgctaagtactttcatttaagctccaaaactaccttacggagtaggtactataattaccttacagattaggaaactgactcagagatattaagtaatgtgaccaagttgacggagctatgttaactggaccgttcacccaggtctttcttacccagaagctgaagccctcctccaggagtgctgaagagctcttactgccacttaggctgcaaggcacttttggggctaatttcatcgtctaatcaatgcaggatactttttacaacatccctggcaagcctctcagattcaattattcccaactaagaaatttactacccttcaagacctgattcactgtcgaaacagctttatctctacctctttaggagtagcatcatgatctttatcattagtaaattataacttaacttccttccttataactgttgctcattggcatgaactgcttcctttacagcagcaataagaggattctttcctctctctttaggctcttcagcaatcccctccctatctgggttaaaaaaaaaaaacccagtttgttcaacagttcttcatataccgtttccatcttaatgatacgaaaagctaatacttatggagtagtgcctatgagctaaacactgctataaacattgtgtcctttattattcacaatagtcaagattacggaaacaagctaagtgtccatcaagggatgaatggataaagaaagtggggtgtatatacctagacaatagaatatcattcagctttaaaaaagaaagaaatcccatcatttgcaacaacatggatgaacctggaggatgttatacaaagtaaaataagcctgacacacaaagacaaatattgtatgatctcacttatatgtggaatataaaataatcaaactcatagaagcagagagtaaatggtggttgccagggatgaaggggaggggaaatggggaagacattggtcaaagggtataaaatttcagttacgcaggatgaataagttctggagacctaatgcatagcatggtgatgacagttaaactactgtattatatatttgaaatttgctaagaggataaatcttaagtgttctcacccttaggggggaaaaaagaaagaaaaaaaaccccctacttatgtgaggtgatggatatgctcactagcttgactatagtggttatttcacaatgtaaacatacgttaaaacatcaagttgtacaccttaaatataattttttgacaattatactccaataaagcttaaaacggcaagaaaactatcatctaatccttgcaggtattctgtgaggctgattctatcaggagtcctgctttttcctatgatactgagtttgaaagagcttatgccatggcctgaggccacccaggtgtgtgtgaggctgggctgggaggggcagtttgactgcagagcccaggctcttaccattgtgcagtccgctctccacctatgccccattcccaccatgacagtcctcttgcagctgccctcaggttttgcaaagtccctcactgaatcctggtacccaaatgaacatagcatttaggaatgaaaagggcatggtacagcaggactgttctattggtgcagtctaggattagtaggattcgtttactttttaaacagccatgtcctactcttgacacgcagtaaatgtgtagttaattgaactggcaatatgttttctccctagaactgctacccagtcattttcctcatttcagaaccagaaagattccaagaacaatgtaggatattacatttattcctacatttattcatcctaccctgtccaggcaaacccaggctgatcctgacatttattctctcagtattggatctggttagaacgtctcctgggtgttcaggagttaggatttcatcaggagtctatctctgcgcatgtgggaagttgcaggctcttggagcctgagtttcctccacgtgtgctttagctacctcataaagcagctggaaataatggatacaaagctctattcaaaactaagttactatttgtatcacaaaaatatttacccaagttactaacaaatatgttgaataggtcaagaccaaaggcagtgttgaactactcgtcagtattattcctccttaatttcatgtgttccaatcttctcaagagcctttccttcccacaagaatatgaactcttgttgcattatttctatatatcccagcacagtttcctctattctcggccaaggaaaaaccactactttgggaatagatcagaaaacagacacaaagggctgtgtaggctctattacagggtttagtctttattccaagaataacacattaaggttaaggtttgtggcattttctgatatatagcattatagatttgtttaatattaaaatccatcagtccttcctcttgctataggtacaatacttagaaattcccaagtttacataaataaaattatttatttgtttactttctctcacttttagatttgttttgttttttacattcaaactttaggaccttctgaaatgtcctttttgggttgcagtgggttgagggagcagggacaaaagaattgtgtgcgtattcctctcactctagctatttattagtattcagaccaagatgcacgccgttatgagttgtcagtttataaggtttgatccttaactttggtggatagttttctttgacttgaatctagactagttttgttgcaaatcagcacacatttatcaatttgacttgagcaacagatctgtataggaatttaacttggacttagaaacgtaaacacagtatttactgctgcaagaaaagcagcagtcaaatgagtcagtaaatattgcttcacctccgtaaaaatgtgcttcatctgggcttgtttattcctaaatcgcttgatcttctgtgcgatgcgaggatccttttcgagctcttccattgtggcccatttacaatgtaagtaggaactatccaaagacatacaaattgtcaggcaagcacataactagcaaatgatcgagctttaaggtgttcaataaacacggtgaccacctaacacagaaatagtaaaatggtttattgtgaaactgctggagattgggcttagaaagaccttccccttaagggcaacaacagaaaacaaaacaaaacggagtaattccaagcaactgatctctctgcagcttctagagaaactggctgagaacagaggcagggcagctgtgggcaggttatcattaacacacattagtgaaagtgggtctgtagcagaaaggaaaatatacaagaggggaaaagagcatatgctacaggagagtggttctctaccctggttgcatatgagaattgcccaaggagtttttaaaaacacaacaatccttgggccccactgagtctgagccaatggtcttgggtggagcaaaggctttagaggtttaaaaaagctctccaggtaattctgtgtgcagctataattgagcgttactgcctaaggtaaacttgagtcagccaagacctgtgggtcatgccttagaggcaagactctgaagatgtagaagataataaagtcacaagagaaaaaaagttttattcatataaaacccaaatacagagaatactttaaatagacgtacaaatttctatacttaacgtagaacagctccaagtcgaacggaggttctcctgggtgaacctgtaacaaacagcaagcagttatcagcccagatcccaggcagatcacccttactgagccaaaagaaaacaggtaatcaatatctctgcctgatttccataaagatttcttaaggcatattttcattttcccaggccttttcctgacacctattggtcaggttttccaaaggtggaatacacagctgcaaggtaaaaaactgatcttcctgatgtccttccaaggtctaggctgggacggcactcagctgataaacccaaactggcccaggacaatgagaaatgtcaggaccagagcctggtgtggaagtgactacattcatctctggcaccccactaacgcttcacttctgaaacaccaatggtagtcactctccaagtaaggaagtttactttcataaattcttgaagtaaagatgaagccgtgctctcaccagcaccaacatactctagcactccaagaatttcctataggagattcctacaatggccctgagatgtctgaagaaaaaaacccccacgtttccattaggactcatatgggtgtgtatgtgtgtatgtatgtatgtatgtatgtatgtatgtatgtgtgtgtgtgtgtgtgtgtgtgtgtgtgtgtgtgtattttaaatagagaaagggtctcactatattgcccaggttggtcttgaactactgggctcaagtgaacctccgatgttggcctctcaaagtgatgggattataggtatgagccaatgaacctggcctctattaggactttttgtccatctcttcttcttggccctctgctaaattgtggtgggctacagcaactaagggatatatggcttttgctaggatcacaatggaggaaatcatcagcttgagccattctagatattttaagagttttatgtcctaaaatgctctacaggggtaaaaataagtgttggctagccagacaatattcttgcctagctctcactccagccaataatggtcattctaggttctctagccaaaaatctcttcacagaagatgtaatctgtgctaatgatataaaagctagaaacatgagccaccaacctcctggacagtcttagatgccaggatcttctcaatgatgtttgcatcatcttctggaggctcctggggacaaagataaaaaaaaaagaaaattgctggaaccacagaatccaagaaaacaattctgtaagaaatactacaatgggtactacttcattcaaaagttcacctttgagtaccaaggcctcccatcaggccacagagtggtcaaaaggtcacaagcattttgcaaagctagaatttaaagtggtggcttctaagctctggacacaactctacaagagcagagaagtttttcagatgcaatttcagatctgcatttaacatacctaaaattggtcctcagatttaccttctttgcaaaactacctacatgttgctgcatacaattttcagaaagctctaagagtatggggtcttaaaattagttctaatatctaccagctattgactttaggcaagtcaattaatacctcctagtctccaaatatattaaaataggagttaaaaatacatatctcactgaattagtgggaagataaaatagtattactattggaaaaatgttttcacatactattcaaaatcaaggtataattattctctattaaattgtaccatctttcccctttgtagctggaaaaggctgtttcactgatcatcctttgaacgtaaatcccaactgaaaacctaaattcctttttaccctagataaccatcaacacttctatcctccaatctccatgaaatctctttctacagagtatttatagttaaaaacacaaaatgtttaacattctttctagaacctcaagcagcattatttctcagtggttcatatgcacaatgaccttttcagatctattacaatatgagacttaaaacaccatatgaaaagaacactcatcacaacaatgaaactgccaaattcggtattctgggttcctggctggaacgtcccagaaggatgatttgtatatcttcagtctacccattctagggtgtaaagccataaaattatagaaaatatctcttaagatcttaaatcaagcttttcccaggaaagtgatgatgggttaaaagaaatgaggaaggcatatggcagaaaagaattatggaaatcagcaagcaggcacaggcagatgttcccaaaggttacaaatatttactaagctctctcagacacatggcattgtgctagatgccatacagaagttaatccaaaaccacacacgtcccttctcaccactcaacaggaaggcaagtaaactataattaccatacaatagaagaaaggggtgtgaatacagactatgcttttgtttctctgtttaagtatttgctctgcttggttcctaaatatagataggtggcagggagaaggtggcagttcactgtttattgctgtcttctccctttactacataaaccttcagagggcagggatccttgttttatataccgacatagctagaccaggaaatgcataatcaataggtattttttgaatgctaaataacaagcaagaggaaaagaaagaaggaaatacagtgaggaaataaagggtcaaactctctgaggccacagagtagagacagctatttttcttgatttatgtcacttaatttaagaagtctcccccatctccatacactcagacttacatactgtcaggacggtaacagcaaagggccaaagctaggtgtgcattaatgagcagcaaggaccactaccactgatcttgcagccaactaactaaagtctgactatggcgagtgggcagtgaacaggtgctaggttaagagaaactagactaatgaaccagcttcctacctcatttccttcctaaatttttatcccacattatttatggagtgcttttagtttatgcactggccttacagaagtaaatgagatatgtctagtcttaatcatgaaggaactatcaggcatgctaacaaaatgcttagttactgaggtatggcatacttgtagtatgcagaaatctgaagtgtacatcttgacgaatttttacatacagaaatgcacctatataactaccactcaagatcaagtttatataatttttccaacactctgaaaaatcctgtgccctcactgtaagtaaccaatattcagacttctaccaccgtagactggttttgtgtattattaaacctcatgtaaatggaatcatacagtatgtagttcattcttttttaacactgtgaagtattttgtaatataaactatccactctactgttgaggaatatttggtttgcttccaatttttgtattacacaagaaatccatataaattatgtcttttggtggaaaaatatgctcatttatcttggatatataactaggagaagaaatactgggttatggggtaggtagatgtctaattttaataaatattgtcaataaataaataaataatattgtcaaaaattttctcagtgattgtaaaaattttgacacctaccagcaaggtatgggagttctgggtgacttgataatgtcagtctttagcatgttagccattctggtggatgtgtaatgttgtctctttaattcacattttcctgataacagaggatgctgtgccccttttcatatgcttactggacatttggatatcctcttttgtgaacctcctattcaagtcatttgcctattttataaattgttctttctaatttattttcaagaattattttaaataagagtcctctctcagatacacagattacaaacattttctaccagtctatggtttgccttttcaatcccttaatgtgtcttctgaacagaaattctatataatccattttatcaatcttttcttttatgaatagtatttttgtgtgctgtttaagaaatttgtattgccaccaacatcattaagctacatatgtaatttaaaattttctagtagccacattaaaaaagtaaaacaggtgcaagtaattttaatatatttcacttaaaccaatatatctaaattatcaatatgtaatcaattaaaaaattaaaaaatatgttaatagtcatttcataccaagtcttcaaaatatggtattttatatttatagcacatcttaattcaaactagctacatttcaagtgctcaataggcacatgtggctgatagggtccatactggacaaggtagttatattttgttcagctggtctatttgactatccttatggcaatactaccctgtcttcactcctacagcttgattacaaagtcttacagttaaatcttccaatttagttctttttcatgactgtctcaggttatgttagataggtctttagcattttcatatgaatttccaccaattaaaaaatgccctgcttagtttttgactgggtttgaattatagacatcttagcagtattaaataaccatatgtggctgggcacggtggctcatgcctattatcccagcactttgggaggtcgaggcaggtgggtcacttgaggtcaggaactcgggaccagcctggccaatacagcgaaaccctgtctctactaaaaatacaaaaattagcgtggcgtggtggtgcacgcctatagtcccagctatttgggaggctgagacaggagaatcacttgaacctgggaggtggaggttgcagtgagcgagaccatgccactgcactccagcctgggcgacagagtgagactccatctcaaaaacaaaacaaaacaaagcaaagcaaaacaaaacaaaacccatatgtgctacatctatttgtttaggtcttctttttcatagctatgtttttagcatagacggcttgtgtattttttgagttattccagggtatctgataggttgatgctattataaatgggatttaataattatcctttcctgatgttatgtcgctagtttatagaaataaaaaatacgtatttgcatattgtctttatgtatccatattgcatattatctttatatatccagcaacttaactaaacctacatttattatttctaatgatttgttagtacattctgttcaattttctacatatgcagtcacatcatctacaactaataaaaaagttttactactccctttctaatcttttaactttttatttattctttctctttattgtagtggccaggtcctacattgtatttctgagtacaaattatgacagtgaaatatttttcttactctcaaattcaggagaatgcattcaatattgtactacttaatacaatattatccaccagattttctcttgtggcttttaaatgttctctcagtctttgtttatatagtttaagatatgcctaggtatggttttcttttttgcatttttcctgctttagagttatctgattttgaatctactggttgatatcttccatcagtttaggaatttttggtcattagttatatcgtcaaatgctactctgctccaatctcctctatccctagcactccaatcagaaatactttgaactttcggctgggtgcagtggctcacgcctgtaatcccaacactttaggaggccgaagtgggtggatcaactgaggtcaggagtttgagaccagcctggccaacacggtgaagccccatctctactaaaaatacaaaaattagctgggcatagtggcgcacacctgtaatcacatctacttgggaggctgaggaaagagaattgcttgagcccaggaggcagaggttgcagtgagctgagattgcgccactgtactccagcttgggtgatagagtgagactctgtctcaaaaaaaaaaaaaaaaaaaaaaaaaaagaaatacattacaacttttaactgcatcgcacttgtctctctttcttatgcttttaccttttgctctgtttgattcattctttttcctctatgtgcttcagaaattttccattgatctgtcttcatagtcactcctcttctgctgcatctaatctacttataaacctatccacttggtcttgaattttataaactggatttttcattctacactgctatctgattttctttatagatgtaattctctgttggaagtcttcattttaaaattcatcttgtccatcttttcctctattttctttttttttttttttttttttttagacaggatctcactctgtcacccaggctggaaagtgcagtggaacgatctcacctcactaaaacctccacttcccaggctcaaatgattctccagcctcaggcttgcaagtagctgggactacaggcacaagccaccacacccagctaatttttgtattttttgtagagaaggggttttgccatgttgcccaggttggcctcgaaattctaagctcaaagcaatactccagccttggtctccaaaagtgctggcattataggcacgagccactgtgctggcgccctctattttctttaacattttaatcatagttattttaaagttctttcctcctgccaactctaatatctggatcacctagggtctgcttctattatatgattattctcttaatttttagccaccttttccagcctctttgaatgtctaattttttttattttatgttggacactgtggataaacaaattgtagcagctccaaacaatattttctactacaagtatttcccattttctcttagacaaccagggcgagggggtggtccctttgatccagtcagagactgagttgggtcaggactgagttactgttttaagattcaatccacctcttattttactgtttttggaacatgagtatccagggtcactgactgagagattggcaggtcttttttctcttgagccctgaaacatgctctatggaggttttgagcttagtattttagtcttctaccccatgcaggttaaaagtccgacaaatatcttaagcaagagtcagtattttgtggtaggtccattcctttagtgatttttttgtctcgtaagtaccacgcaactatgaaatttcaatctgccttctgtctgaactcctagcttcctgggataccccagaattcagcagaagtctcttgaggaaatccccttgctttggggatttctttagtttccaaacactccacgagccctgtatattcaatccccaccagggtcagatggtttctcttctatccagaacagtctcttttgtttgggccaaacctgatcctcggcccactcccagaactgagaaatgcctccagagaagaaaacagccagccatcgtcagcccacctccggatgactcttactgtctgatattttagttcatctaattcttgttgtttccatagctatttgatgcctttaaaaagagctttttgtaatttatatatatattttttccaatattaactcttattaccggagcagtctagggcctagtttttggatttcttctcttttctatctgtattcattctcttggtgatctcactcagtctcagggttttaaatacaggcatcatccagctcagaacctctcccctggcaatagcctcatatacataattcctatatgccatctccacttgagtatctcagaggtatttcgaatttaaaatatccactcactaaactcctatccaatccccctttcctacccctcctacctacagtcttctcccacctgagttagagtaaattatcctttcagatactcaaaccaaaaatcttggtgtaatcctaactcttctctttcctttccatacaccatatctgactggcctagaaatcttgttggctctatcttcaaagtatgtccaaaacccaatctatttctcaccatctccattgcttctaacctgatctgtaccaccttcatttctcacccagattattctcaagagtctcctaatttgtctccctgcttcagttcttgccccactagtctattcacaacctaacattcagaatgaccctttttattatgctccgcttacactgcttaaaacgcttctcttttaactcaaagtaaaactaaacatcttccaatgtctacaaatcctacagggttcctgcccaccctcccacctcatctgttatgtttcagttatccttgtccattcttcatgcataccaagcatgcctctacctcaggactttgtatagactattccctctgtctaagatgttcttctgccctgcacaactccctctctcctttacctccttcaattatttgctcaaatattatacttttagtgaaggcaactctgaccaccctatttaaaactgcaatcctcaccctgaattccatatcacccttattctaatatatttttagaatggcacttactgccattgatgtactaggtaattttcttatttaaggtttattaacagcctctctctatttacttctactctttagaagttttgaccttggtcctttgacctcccatgccgtgtaggttcaaaatctggcaaacactggagggagagaccagttgtgaatttgttgcaagctcttccacgagggcaggaatttctgtcccttttgttccttggtgttatttccagaaattagatagtccttggcatatagtaggtgctcaataaatacttctgaataaataatgttaggagattttgcaatagaatatgataatagaagtaaaaagcaagtactatgagaacacagaagccagagcacttgggtgaattagaagaggctctggaaatgatatgacgtatgagttacatctgtaggcaagcagtaaactttcatgactgctgactactttccccacctgctcctaagtctgtatatctcagactagcaagcaagcatccacacatgtacatacactcaaaggaacaaagttctcttctttactactagactgcttcaaatattttcttatttttacctaccatgaagaatagataaaaatggtttctgatgataggattttgattacaattcagaatatttaactaggaccaaatctaaagaaactttaatacatggatgaagaaagcacaggactttgaatactaaaagaagtcagggtttaaacactcttcatcataggaaattttcaagtgaaaattaaggagtttgaagtaaaatttcaattttttttttttttggcactgttaaaaaagagggtaagcactcatgttaaagaatcagtagtgatcatccaaatatggaaaacgggtttttattttatcctaatgaaacgaaaagggagcagcctttctgaaatacacatcgaagtaggaagggagctggaaaatcaggatcttttttttcctgaacagagattgtgcgtaagtacgatcatgtgtgtataaacactcagtgtatacagatacacacagatataaactaaatctgcttgccagacacacttccataacaaccatctgttctcaactgcttggaatttccttaaattatccttcaaagaagaccattttaattcatactctttttatgtcagagatttatataatcttaatattttatccttagggaaaaatttcaaaaacttttaaccctatttaccttcaacctcagccaactacctcttttacttctatttagcaaaccataaggagggagcctaacaagaaacaaatcatgtttcaaaccacagtatttaccaagtgccatggaatatacaaaaccagtatcaagcttgatgcccagtttcaaggggattacactcattcagggaagacaaaataaacatatctgtcttagaaatatcccaaggtaaatgctaattggttaaacagtaactacagtccaatgagaattcagaaagtgaaaacagcatggatttcacagcataggtgaggttttagttgggccctaaagaacagtggctcataaaagaggacagcaaagagaaaggtaagatgaaatgagagatgaaagaacaatcatataggatgtatgatgcatatttagaatgctaagtaacctgccttattagagagaaagcattacacaaaatgaggagtagtaatcagagtaaacaggtagtgtgtagccacatctttaaaaaaaaacacacaaaacacaggagttttgatctaacacgggagttaaaaagtaaccatcttggatttcgtgagcaggagactgagaaataccagcaattcccctggtattttgggaaagttatcctggtatccgactggggagagcagagacttgtggcagggaaactacagaagtgtgtgctgcagtaaactgtacactgggctcagcacagggggtggcagcagaaaccaagaggaaacaaatacaggaaacaacctaaagacagtgtgggaattggtggttgtacccagtgaagaaatgggaagactcaagaaattacccacccaggctgagctgacagaagccttatgatgaacggccccaacagacacttctgcaccgagtctcacatgctggcacgaagctacggcaatgtcaaatagcagcaaggagtctcagaaaggagccctttctgagggtttaagtgagacagagatgaataccagtgaggaaaaaatgccagtataaggaaatggaggaaacaaaagcctgggagaaaagaaaaatctctttcctttctaatacagaggcttaaacaaatcataccagtttatataatgagttttaaacatatttattcactcactgaataagttatttgataagttcaactaattaggtctttatactagctactaaccaacagaaacatacagttctacctatgctaagcaaaaattacaataaattaaaaagtgatgcctgtttttgcaaaactctgcaatctgattaggggaacaatcaggagtgatcatcaaaacagtatggcagaggcactgaaaatcaggaccatcacaggctatgaataagtggtgcaacgatcccagctcaatctagacttagggaataataattataatagtgaaaaacattatcaaacagaagatggaaagtgccacttcatctgaatagttcctgggagtaaatgtaaattttagtttattgaaactctcctacctgagaggcacataggacaaaaaaagatacaaatcctacactaacataactcatggtttagaagaaggaaacaaaaaacttggcaggtgttcgaaggacaatgacagttaaacatattagagtgccctaagagcaaaggggaggggcacttatccccagctcggaggagcaaggaactttcgggaggaggaaacaactgagctcagcctgccaggtatagaaaaaggcctatcaaagaagagtacactgtacgcagacacagagcacagcacaggagagcaccacgagccaaagccttattcaaattcaagtccttctgttccaaaaggcaaaatcacacaaaccacccaaactgcaggaggcaaaaactgagacaggcttgtcaacagtctttacattgtaaaggcactgcagaattctaaaagtttgtgttccagacaccaaaatcagtttgacaaagaataagaaaataaagagtcacatttaggatggaaacttacttcctgcccctgaatcccatgcttgggattgtggtatggagtgcaaagcagagctgtgataacatgccagtcctgagctaaagcgaatcctgtgtaaagatgttttcgcaactcaccacttggtaaccaatcctgaggttgtgatctggggctgggacaagggccagcagtcacagaattgcgttgagcacactgagaagatactgcacagatctgcagagatggcagtggggccattctggtgctgactccatccccttctctgccctgagctaaagctagcaggcaggcagacacccacccagagggccccgggagaaggatataggaaaaagccacctcttcttcaatgattttctgtgccactgcatgtgccttgagattgcctggaatcctagatgagattcaaggctttcaggcttttcgttagcgtgggaaatctttgctcaaacttcctcaggaagcccagtatgtaaaaacagttttaagtggagctgttttggttctgcagcaacgaggactctacagagcaccaattttgaaaatcactcggtaagccgatctctccagtcccctcactggttgtgtagcctgccctgcatgctaggccaggccttggctcggaggccagccccacatggtcgcttctctgaatgtcaaagccaaaaccatgaatcaggcctctctcttccttaaatttagtaaatttttttgagatataattcagattctaatttatgtttctccatatataaaccctctgtttgctacatccttagaagaaacaaaagagtcttaataagatacataacatttcctgaattatttctgttagttagatcagctactgatgcccttcaggtgccaggggagaagtcataacaacatctgaaatatgattaatggcttaggccaaatggctactaggagaaaataaaatcctgtatagtgttttaactaccaaaccaaccataacatccccaaggaatgaaaaccccattacaaagcaatacaattctatcacctcatggcagtcttgcaagtgctatttttaactattaatatttgcttgaaaagtattatagtgacaatatatcaaattattattcctactaagtgttatattcattagttgggtaatgaatataaccatgacatgaaatcaactgttatatgctagtcactgattaactgctgctatgtaactctgacctggatcgttctgggcttcagtttcttcattgttaaaatagggacaatagtccctgctccctgctactttccatgcaaacacagagtgaaagaataagcggaattatatgaaaatgctttaagttggaggcaaggtggtcgaggaagattaagtactatcagtttccataagacacactagcatccaggaggaacgacagatatttgtgctgctactgctccatacagtgtgaattctgccaagtcagcaacagtgactccataacaacagacagccgtgtcccagaatgtgctcttggcaataatgcccctcctacatgcacagcctgcttcttctcttgcttttcatttcttctctataagctccttggcacagacctctttttttcaacatttaacccttctctcctttctagtacctctgtattaagtgctaatactatcatcttcttccttgacactgctgtcaatggaaactgctaaaatgcaaatatagtggtcctactcctctgcctgaactcatcaatgcctcctatcccttgtccaatctgcaggataaaaactaaaaaccttaggtgatactcaaggcccttcatactgtgactgctcctatctctcagtcctcctctctcaccacccctcaaattataccccagcatccagccaagattatccatttgtcatatcacagcctgcggtgccattcagtttctggggttttataaagttcatgttggaaatgttcctcctaagttcttgtcttctatacatctgaccactcctttcctgtccactcctgcttctgttagcctctgtacccagcacattcttctagacttgcaatacatgcttgttgaattagagttccaacagtaattactagttcatttgatctcatccacttaacagcgatttattatacaaaagacttttacattttttttttctttgacacagtcttgctctgtcacccaggctggagtataatgacgcgatcttggctcactgcaacctctgcttcctgggttcaagtgattcttgtgcctcaatctcccaagtagctgggattacaggcctgcaccaccatgcccagctaatttttttttttgtagagatggggttttgccatgttgcccatgttgatctcgaactcctggcctcaagtgatctgcctgcctcggactcccaaaagtgctgggattacaggtgtgagccacaatgcccggccaagactttcacattttaatgagagacaagtaaaacaaaatcagagatcagacacattcaaatgcaatttgtgttgtggtaagtgctttaaggaagtacacaaggggctgaaacagaatatcattgggatgaggggcaggaatctactttagataaaagatcaggaagaacctctctaaggagataacattttaggcaaaactgataaaccagtcacgtaaagcatcccaagcagaaggaacaacagaggcaaaggtctatgggtagagaagaactgttagttcaaggcattaaaagacagccagtcttttggctggagagtaatgagacagggaaaaattgtttatctaaaaaaatgaagaatttggcaaaacaaggcgagagtgtgatcgtggagggtcctgctgagcacagtaaggagtctgaatgtcattcccaatgcaacaggaagtcaatcgaaggccacaagcagcagttaaaatgatctgacttatgctttagcaaaggccaagaaacacgtctgtcatctaggtcaaaatgactgtccagccaaggtcagtaacctcatgcaaaggccatacctccgcctgccaggccagtgtagaggctgagagtgcagatgttcgaccagctccaagaacagcaattgtttccccatcatcatccaccactttgaagtccaggtcctcattgtattttctgcgctttacttgccttcccgagcgtcgtttctgtagggcaaacacacccgtcagagaagctctctgagtgaaagacaacagcctacacaagaataccctcatctacatttactaacatgccaaggagtgctttcttgccttacaaaagaaatctttcttaaatacaactcttttaataaaaggactaaattcagtcaaaatgggatctagctgagtaggggacagaacaaaagctcaatctccaaattgccatgatccactaaaaagaaggggtagtgtctcatagtccagtaagatgtgttttgttcatcaacggtagtgactttccccctttcagaatccacttctcctccaataaaacaaggatgggagctgaactctaccatctttggggtcccttccagcacttggtggaagcacagattttatgacatgatgacagttttattgtttttgcttaaattcaccatccttaccacatacttctaaaaatgtagtttgaaaactaattagtatcaattttttggatttactttgagaatctcgtaacacttcttgaaatgcagggagacatcttaagtgtgacaaaacaaggtccctaagtcaccttgagtgtgatgatctaaggattcatctctaattaagaagctgtaccttttaataatcaacaacaaaacagcccagtggctttctacaaatagagcagcatacagtccatctctacatactaatcatatctcaacagtagaatcacttcagggaaccatttatcagccagctcactctcaaatatttaaatcttaaaaaacaaaagcaaaagcaaaatcccacctctcttttcttctaaaagatacctcctgagtgtctctcttctgttcctatcacttcttcactaagttacctctatgatgttttactttatatgagggattccacataaaaacctctccccaacaccacatacagatcaccattctacaaacacctaattccctgccaaatcccatcaactcaacgtgcttggctcctctgccaatctagacacttaacagccaccagccccagtttataggcagtgaggagtctgctctgacaccagacactgctgcttattaatactatgacattactagctgtcattttcctacagggaagagcagtgagaaacccatgaaggtccagatgatcctggaaggtatagtacgtcagtcttattctaaatgagccttgcagcagagtggctcagataaattgctaagaatatcagaggaaacaaagcactttcaaatattagacttcatgctcaagagaggttctcaactcagaaaatccctaacactgtcacgggcacattttggtatattttcaggaatctggtttagatgggcaactccttgtttccaagtttggccaaaccttccttacttgttggcataatggatacatttctgactttcccagcatctgggattatgaaaatatccctgtacgggctggcctggcactctgagcactaaatgcattacctgtatggcaaaagaggccttacctagcttggctcacaacttcattttccacatcaactccctctgcagcctaatatcctgctaccttccaggaatgaggcaaataccactaaaaaactgggatatcattagtatactgatcgggctagggcaaaagactacagtctacctgctcacccaccaaaacggtaaaagcccagcccagggctagggagtgtgctagagaaaggcatagaggagcaacacgatcagtgtcagccagatcccatccaggagccgtaatctccaccaggcctcccggtcacagctgtacctggctgtctgtagactcagtggactcctcaggactccgcagagatgggttcgtcaggccctgatccagctctaaactctccactgtagtttcacttttcctttttcctttcttctttttctccactggggttggtccttgctccttgctacaaggagaaattcagaattaaaactgttgggcagtttttaaaactaagatttctcatgtgatcaacgtcatgaaatcacatcctggaattctaggaccagggcaggctttaatggggaatctacaagagtttcttccaagaaataaacagaaacatggaaatatctacatggatcaatgcagaattcactttattacaccccatcatgactattatagctacaattaatatgtaagaaataatatgaacatctccaaaaacttcactttcagtttatacaaatgtcttctctaggaagttcaactgcttcacagatactaagaatcatcaaattacaatctccctttaagtttcttaggaagagacatctccctaatctgtcaccaacctctattgagtacacgctggacctggagtgaacactaggcactcaaaaatgaagagaacactgcctctgcccttgacaagcttacaattatgaaaatcctacagttcacctacaaccacagcccaaggcagtacatgaatgcttcctcagagaggtagagatgggccaagtccatccaccctgcaaggccctgctaagatggcaacattttctctaaaaggcctttcctggccttcctagctggtaaaatctctttcctacactcccaaagcacttccaactatactttgcttaaacgacctttcaccagaattagttgttaactacaatatgaggctcagaattcacataactaaatacagtgcctggatcctctacagttgctcaataaacatttgctatcctggataaatgagtattttatgcttctctgatctctcttatcagactcgaagttcctagagggcagtatgtgcttgactatgttttgtattcctcagagtgagtagtcttatgctttatgcatagtaagtattcaattaatatttaagcaagccttaaaactgctttttaagcaatggatagatggatgcattaatgaatggctatgattaactgtgaatggggagatttgagaacatgcatttgagcagagatacatatatgtgcacatataaaaacataattctgacagacagtagtaggaataacaataactaatgattgcagctaatactttatataataattactatatgcaggcacattcttttacatgaattattgcctttgctcttcacaacagccctgtaaagcagatggtaattttttttttttttagacggagtctcgcgctgttgcccaggatggggtgcagtggcgtgatcttggctcactgcaacctctacctcccacgtttaattctcctgcctcagtctcccctgtagctgggattacaggtgtccgtcaccacgcatggctaattgtttttgtttgttttcagtatttttagtagagatggggtttcatcatgttggccaggctggtctaaaactcctgacctcaaatgatctgcctgcctcagccttccagagtgctgagattacaggtgtgagccaccacacctggccagcagatggtattcttattctcattttatcttgaggaatctgaggcatggcgaggttaagttagatttccagggcaacagggttagtaaatggcagagacaagatgtgaacccgagtggagtctgtgctcttgatcatagcattcttggggaatagaacagtgttttggatacatttagtaaaagatagctggctctgtgtctggataacagggcaagtgaacagaagcactatgtgatggagctcaaaggaaaaatcaagggtgcaccaggccaggaagtttagacttcattctgcgtgaaaagggccatgaaagcaggtccaggaaagagggaatgaagcctttcaagggtggaaatgctttgaaaggcccagcaggagtagaaccaggaagtctcggcaagtgacagaaagtggggaacaagaagagccaacactggtacttcccatcaggagagttagtagaaagtttggggaagagaaggaaactggatgacctggctcagaggggtgatcaagcacacgaaccagccagtgctgatcgctcaatctgcctgcttccctcttgaacacccgtcacccttcatatgtccctaaccaggtcagcacaaactctgcccagcttctattccccaggctggagacgggcttgcctacctaccaggaaagttcatgatgaaagctatttgcaaactaacacaggaacagaaaaccaaatactgcatgttctcacttacaagtgggagctaaatgatgagaatatatggacacatagaggggaatgacacacactagggccttttggagggtggaggatgggagcaggtagaggatcaggaaaaataactaatggatactaggcttaatacctgggggatgaaataatctatacaaccaaccaccatgacataagtttacttatgtaacaaacctgcatttgtacctctgaacttaaaagttaaaaaaacaaaacaaaactattttgatccaacctaaagaactgaaactctaggggtcatgccatttttgaggattaccgatttttaacaagggacttgtacccttaagcaggggaaaaagcaaaagttcttccttttcttatcagttcagaagaggagactcaggtaaaacagttttaaaagatgctaaattttcacatgagtctttatctcatgttatgtggctcctcattaagaaaactgcatagcaaattacattctacaaagtacttatgaattccatgtctcatcccaatcccatgagggagccaggacaaataatccccatattccagatgaggaaaactgagatttaaaagcagcaaatgccccaaagtcagcagcagggcagaggcttacgctcaggtcagctgagtcacagggtattactttttcataccaagtcatgtattttgcctctttttttctaaaatcccagtctcccttttagtaaatgtaaaaacttcaaatatcctttaatgttatttgaatctcaaaataatggtttaaaaaatcagcaacattccaatgacccaaatatataaaattcacaaattcatagatgttgatagttttttatagctctcttagaaaaaggtttctttgacacaaatttaaagaaagcttacaatatcccaaaagtcaccctaataatcacatgctcagtggcctctgaatcttctgtacaatcttaaatctttctttccagcatttgaaatcaatttcatctacttactaaacgtaacttcattatattagaacactgtctgtatatgtttaaccttcattttaaatatttattgtgtgtatatgtgtgtgtgcgtgcgcgcgtgcccacatgctagaatcatgtgcttcactgtggaacatcatactcaaagctaaaccaagcccaaatcataactaaggaatagaacttcctcaaaatatgacacttcactaggagacttgtgtgcattttgagcaacatgttaaatgttgaaaggaggggggaatcatggtgaagcactttccaagtcaagcctgaggcgctactagattttcccagacagaagctgggggttaggtagcctggaaatactttctcaaatatttgtcagtaaaataggaaaataccggcagaaacgtgctcccttatttgcaggtaaagaagaagatactctacttgggaaatcttcaaagtgattttttggaggttacctttggcaagacaagccattttaagttccaaaaattctttctggagctcttctgataaagtcaagtttcaggaagaaaagattccctgaaagcttacaagtgggatcttcaaataggatattaagaaaataccatctgaattcatcctctaaaaagaccagataaggtatatatttctgctctttggaaaaagttttaaaaaccttatgcttgagagttttatcaactgaagacatttcaatctccaaactgctatacctatagatgatttggcccatgaatatttgtttgctccttgaagttccaggttcttcaaaaataatggataggccaggtgtggtggctcatgactgtaatcccagcactttgggaggcccaggcaggcagactgcttgagctcaggagttcaagaccagcctgggcaatatggcgaaaccccgtctctacaaaaaaatacaaaaattagccgggcatggtggcgcaggcctgtggtccccgctacttgggaggctgaggtgggagaattgtttgagcctggaaggcagaggttgcagtgagcacagatcatgccactgcactccaacctgactgtcagagtcagaccctgtctcaaaaacaaacaaacaaacaaacaaaaacaaagtggataaacaggatctaacaaaactacatatgcaaataatctttgactcagcaatctacttacaggaatgtaatctaaagatatatcacacgatataaaaacacatattcatgaggttatttattacaacattttttggtaattgtaaaataatgaaaactacctatctaaacataaatgactgaataaattaggatatatacaatgtaatactagacagctataaaaacaattaagaaagaattctacaaactgcaggaaacaattccctatttaataaatggtgctgggaaaactggctagccatatgtagaaagctgaaactggatcccttccttacaccttatacaaaattaatccaagatggattaaagacttaaatgttagacctaaaaccataaaaaccctagaagaaaatctaggcaataccattcaggacacaggcatgggcaaggacttcatgactaaaacaccaaaagcaatggcaacaaaagccaaaattgacaaatgggatctaattaaactaaagagcttctgcacagcaaaaaaactaccatcagagtgaacaggcaacctacagaatgggagaaaattcttgcaatctactcatctgacaaagggctaatatccagaatcagcaacgagctcaaaacaaatttgtaagaaaaaaacaaccccatcaaaaaatgggtgaaggatatgaacagacatttctcgaaagaagacatttatgccgccaaaagacacatgaaaaaatgctcatcatcactggccatgagagaaacgcaaatcaaaaccacaatgagatatcatctcacaccagttagaatggtgatcattaaaaagtcaggaaacaacaggtgctggagaggatgtggagaaataggaacacttttacactgttggtgggactgtaaactagttcaaccattgtggaagtcagtgtggtgattcctcagggatctagaagtagaaataccatttgacccagcaatcccattactgggtatatatccaaaggattataaatcatgctgctataaagacacatgcacacgtatgttactgcggcactattcacaatagcaaagacttggaaccaacccaaatgtccaacaatgatagactggattaagaaaatgtggcacatatacaccatggaatactatgcagccataaaaaatgatgagttcatgttctttgtagggacatggatgaagctggaaaccatcattctcagcaaactatcacaaggacaaaaaaccaaacaccgcatgttctcactcataggtgggaactgaacaatgagaacacatggacacaggaaggggaacatcacacaccggggcctgttgtggggtcgggggaggggggagggatagcattaggagatataactaatgttaaatgacaagttaatggatgcagcacaccaacatggcacatgtatacatatgtaactaacctgcatgttctgcacacgtaccctaaaacttaaagtataataataattaaaaaaaaattctacaaactgataggcaatgatttctaaagatatttaagtgaaaaaggcagtgttaaaagagtataatatgctaccttttgtgtaagaataaagggaaaataaaaaagcatgtacacatctattaatacaaaaagaaacagaggaagggtaaacaaaaaaccccacaatgtctatctacctgcaaggggtaggggagagaacagtagcagggatacaggagggagtgacacttctctgagtatacctctgtacacagatctgcctttaggaaatctgttaaagttctacatattaaaacataaaaaactaaagatgaaaacaagctgaaacaactgaatccatgtatgtttaaaacaagtagtataactacacctcacagagaataaaaccccttccattaattgattaacacagcatttgactacatattctccacttctgggggaaggggaaagtatagcaaaccaattctgaaattttttttcttggtagttaaatggtgaagtgactctgaaactatttcagatgtggcataggattaagcaaacgagtgaacgtattgatgttgggaactggcaaatatgaaatgctataaggcaagggagatactgtcagatgaatctcaactgcaggcatcatcagttgaactcatgacttctataacatgtatgaacacaagcatgtatatgtgcatgtgtatatatacacatataatatgtgtgtagatatatgtatatatgtgtgtacatatattcatatgtgcgcgtttgtatgtattttccccctagttttgacaacagaaagggcctaagagcaaagatgccctatcagcaatgagtacacctaacactcagatcttggtgtttaacactgaagctcctcacagaaatggctgattccaaagctaaagcagggaagacagacgatgagcccgaaacatcctgctatgtcagaaagtaagagggtgtttagaaaaataaacatggcatgtcaaaatgacaaataagttagcttgaagagctttcgttgcccaaaactgagaccatctgaacaccaaagtaattgaggacagtaaagaattataagtcactgaaaacaataggaatccataccaatgagacatacataaataatgaataagggataagggggagctcttgtttactacaaaatacaaatggtaactgtaaaggaagtggtagttagaaaataattttgaggctgggtgcagtggctcacgcctgtaatatcagcactttggtaggctggggcaggaggatggcttgaggtcagaagtttgagaccagactggcagcatagtgaaaccccatctctacaaaaaaatcgggaaaaaaaatcagccacacatgatggtgcatgcctgtagtcccaggtacttgggaggctgagatgggaggattgattgagcccagatggttgaggctgtagtcagtcatgattgtgccactgcacaccagcctgggtgacagagcaagaccctgtctcaaaaaaaacaaaataacaaaccaaaaaaacccattttgtaaccaacgtagaaaagatgcgcatggtgcagaatcatcaagggatgctaaatcttgggagaaagatgtgaagagaagcaggatatttgcatgatcttaaaatgtctccctgcagattacttattagttataagggaacgaaaagaataactagacaatggttacagaagaataagaacttaggaaagacacactgatgtatttagggacaaaaaggcctgacatacgtaacttgtttgcaactggttcaggaaacatgcgcgcacgcgtgcgcgcacacacacatacataaatagatatttattgaaataagtttataatataagtatatatacatatatacactttaaaaaataatttatcttgacatacgtctattccactgcagaagtggatactgtgtttggcatcttttcttctgacaaccaatactgattcctagactataaaagagctctggcagaaggtcagactgggctatcgtaccctattctttttaccatggtgattggtccaggatggacacatgacccagccagactaatctgggagtccttcctttaaaatatatatatatatgcaggagtgggtaggaaaatgaatctttcttcctaggtcatgaagttgttaagctgtaagcccacagctatgggcagccatgattccagccttgagaggaatgcatttgcaaagaatggagtggcacccagacaggcacagggggtcactgaagacaaactgccttggtctcaactaaacttcctggttctgattccttaagccagtgaacctcatcatcatttttttctaacttaagctaatttgattgggtttatgttacttgtaaccaagagagttctgaataatacaaaggcctaatactcccaccaattaatggcacaggagcttgaatcaaagcaatcttatttctataatcctcttttttattaatagctttcagagttagaacaaactaacttgcaaggaaaaaaaggaagaaataacatttttgagagtcaaagtaactattttttattaaaacttgattttacaatcaaacatatctccactttaaagaaagtacctactatgcatttatgacatgcaagaaactcccaatcagttatatcatacatgtaggacaactattagttataaccatcaaagcttttatcctgtcttccacatggcttcatcagccaagaagattttgtgcatctttactttctgtagtttgtcctagaaaaaacgtgttttttgttttttgtttttttttttgctttccaaataggaaatttcattatcatatgaaagcactaggatttctcaaactttctcttcaagcatatctccagtttctaacctccaggtttctttgctagaactgagagttaggaagtgagtgctgaatctgagtacgaggaaagatatgggtacatgtcacgacatcgtactactatgaatcttttatggctctgtccccgtggactccaggtattgaaagctcttatctactaagatgcattaattcaaaatgattcatcttctcattttaaaattaaaaccttataaaatatccatcagagccttacggaaagaatgcgttactactacagccaccgaaaatagctcatgatcccaatgactgcctccaaagacatgtagagtctcagaagtccagtccaggaaccactactccactccagcaacaatgcttcagagaagcttccagcactgaccttcctataggctttgatcttcttcccaggagtacaatactgaaaacatggatatcaccttgaaaaagctcatttgcacacttgattcagcttttccataataccggtattaactgagtctacatagaaaactgagttggtattgattttttaaagatactagttaaaagaaaaaatataaaaagaccctaattattttggtacagatataatctgctgtagataaactgtgaactaaatctgccctgtcagtccctttaaccgtatcatcaacaccttcaaaatggagattagagaggtttgtgatattgtcctagtaaaaaggaaacaaaaagattacttcctcttaagatgaaaaagcagagttttaccaagtagtcctatcaaaagtaataaaagtaactgaaaataaaaattcagaaagtatagaagagtttcaaataaaaagtataacccatcctcagtacaccaaatccccagagaggatcacttttgactgatgcctctctaaccccaaatacgctcatgcttctagttcattatttatcaacattaagcaatggctactgacatcctgataggaaagttgatgaattcagatctcatatacctcccctgttgctgtccctactcagtattttcgttgaactctcttagtggaggcaaccacactttaaattttcattaattctttgcttttctgattgctcctctgtcatgacccattcttgtgttgcagacaaaataacctcaatctgaggatgctaatttaaaatgtgttcattcttttccttgaattatttcttctgatgacagttgttcttttctttcttccttttcctgctttatgctgctcgttttcctctacggtcttggggtcttcagtagactgatttcctattgaaaatcaactaggctggtaatacaggtgcctggtgaggctctcctctgctgccgagtaaactgctttctctacaagcctcgcccctgaataggaagcctggcctaggacaccgtacacatggcaagacttgtcaagtggctgtccctccctccactttttagggtatgggcagggaagggcagagaagttagtgccctgtgcccccttcctgtgggtgtcattccttatatggagccctagccccttccccagggcaaactgcccaatatccttagagtaattgcctgagttcatcctggagctgacaaaccacacagccattctgcagacagtcccttaatcagccacctccgcttctggcctgcctccaatccctcctccagagctgcctgctccattgcaaggaggaaacacctctatgtttgctgcaaacacagcgcctgcctgagctctgagctaggactccctccacaccatttatccaccagtatgatcccactggacttctttgtccagaaattcagtaatagctctcatctgtgaaatatttcttcccctctgttcttcctatcatttcagtaagatttggataagaagtgaaaatgaaagcaggctgcgtgtaccatcttaaaatctggaagcccctaaaaagaacatttgtttaaatgtcttttggtctttttgctttaagccttttctcatctattaatttctttaataactggatcaatactcatctcttccaagggactccccagaccagaaatgacatactctttaccttctaaatcctttcagctactctgtatgcagttatatcaggtttttcatttgtttatatttttgcctgtgtcttgaacacttgtcaaggttgcttcttgtgaaaagcacctcaaattcataaaagtacctcaatgactagtctcatagatacttctgtgacactttgcttcctttccctataaaaaaactcataaagcaagacacagaagaggcaataaaaatatactggataaatgagtaggcatttatcaagcattattatttagtaactctttccttacagatttggtaaaggtctactatgcaccaggccacagagtaagcacttctgatgctcttaaaaaaaaaaacaaaaaccccagaaataaagacttagtgcaaagcttccaaggtgggtctctgacattaccatttagatttcttccctggttaacatgaagtccaatgggttccaagctcagggtctctactgaggactcatacacaccgttatgtcttctttattctaataaatggtcacaatgtaaaaacaagtctcccaacagaaagaaccccactaatgtaatctcttgaacctgaaattagcctcaataaagatctctctaaacagatagctgattgaccttcaaataaatgagaaagagccaccagctcttgtgaggaggaaaggtagttgagttctactactcttcctgcaccacacagttatcagctgactcagcggcaatcaggcagctcaaatggttatataatcagaaggcctggggtttaacacttcgcagaagcaatcatcacagatgaaagcgaaaaaaggtaaaatgctggatttgggagaaaaatctgctctgggctgacaaaccaaacaaatggggatgaaaaactgaaactggggctgatcacaccaaccacttcttttcctctttttgctttttcattcctagcagacgttacatataaaaacttacacaggctccacttttcctgtgatctttcacctgggaaacatgtttctcaaaggataatctaagaatcagccacactctaattacctgggagaattttgaactgcaaattcctgggttccaccccagacctaatcattctctctggggaatccacttttctaacaagctgtccaggtagttccctaggcacagcaaagtctgaggaccagagatccaggtagatagacctccacttgggccagcacattgactaatttcttgacttgcaagaaagaatatgaaccattctcatatgtgtggaaattccaaagctcatcctctgccctcaccaacaacatgaacaccaaaactcaagaccctagcttttaaaagcaacattcaggctgggcaccatggctcatgcctgtaatcccagcactttaagaggccaggcaagcaaatcacttgaggacaggagttcaagaccagcccggccaacatagcaaaaccccgtctctactaaaaatacaaaaaataaactgggtgtggtgtcccagctactcgggaggctgaagcagaactgcttgaacccgggaggtggagattgcagtgagccgagatcacaccactgcactccagcctgggcgacagagcgagaccctgtctcaaaaaaaaaaagaagcaaccttcagctcagtcaaaatgcttggctccctatgtgagaaagggcaacctaaagagctggctacagacctactcctcagatactcactccctggatatagagtaaaagaatcagaaggcttcatacacaactgaaatggatcatctttcctgctcactcggctgtgccttaatgccacgaagctgactttttactaaaggctatttcaggaagaaaaaaatgaaattcacaggcatttagaagcattagatgcaaaaactgttgttgagcacagatctactgcataacagttcttgctataatctgaatttgtcccccaaaattcctgtgttggaaacctcatgtccaatgcagcagtgtcgggggttggggtctaataagaggagatcaggtcaggtggctctggactcatgaatggatgaatattgttatcacaggagtggattctcttgagagtagccctctctcgttaacatttcatcctctcttgctcctctctctgcctttggccacaggatgaggagctgcacacaggtcctccccagattccagtgccatactgttggacttcccagtctccagaatggtaagccaaagaaatttctgttcattatacattatccagtctgtgtattctgttatagcaacataaaatgaactataacagttccctaataagaaatttctttctcaaatggtaaaaacttagcttctctgagaaactggcatgttgcttttctaaggccaaaacattatattcaatataatgaacaattttgggaacaatatattcccaaagcccttattaacatttcatgaccctacatgacctgacccctgcctttctgatcccctcctccagctataccagccatgtacagctatgtatgcataggtatgtgtatatgtttgtatgtatacacataaacgtacatctgtgtatgtcttcttaggcaagtggctccaatcctctctggaataaggcactataattttaaaaatagtataaacatatgagttataccaaatgaaattttaatttcagagtcaggaaaatgacagagcctaacttggcttcctgaaggagctttctttcttgcttaagttttacacaataaaggaatgaactaaactcatactcaaaaataatttagagaattaagccaggtttggtgatatatatctgtaatcccagctattggggagaccccatctctaaaaaaaataataataataatttggagggaaaagaataaatactagtttcaattgaaacttctcctatttaagaattttaggcttttatctcttaagcaataaatgaatactgatcactattaatatcatccttgaaaaggaaaatttgctagactctacctatcacctgtttagaacagacatgttcaataatctgcttgttgcctctcaaatgcaaacacaaacaaaggaaaaagttgaagacattttagtccttgaaaggataccatggagtatgcaaactgaaattctatagaagagggaccatttcctacaaataaaaaccaacttctctgacactgaaatctccccacgtccatttctgatcttccttagcaaaacataaaagacacacggctatggagagaaaagtcggttttacagtcaggtgaacctggagtcaaatcccaacaatggtgctcactagttttgtgccttggacaagttacttaactttttgaactttcattcaattataaaatggatatattacctactgttatataacaataggagttataagataccttatacaggtcttattttcaaggagaagagctctatccatttattcttggtatatatacatatacatatcttaacttttgttgaggaaaacaagtcacacatacctgaaaaccacaattaatgacgggaaaagtagcctgttttagaggcaaacatacaagactgggaatcaggcctgagattataacacacatctgtgaatgaccttagacaagtcacttctctgtgggtctccgtttccctggctgcaatacaacagggctatggaagttcagaggggacacacaggtacactggtttggggaaactctgatatatatctgaactctgatatatatctgaactgagacttgcactcagacctgaagaatggaaaggacttgggatactgagagaagggtaagagctggggaaataccaagagcaatccaaaggagaagtgggtcaaggacctttaagaactaatgagattaatcgagttggccaggtatagcgccagagatggaaagagagggagatgtcagaccccagagggtctgaataacagaggaaggagtctggattttgtcctggaggcaacaggagcaatcaggggacaacaggagcaatcagggggcaacaggaacaatcagaagattctaagcggttataaattgttgagggaatcctatttccctgcctccatgttttcatgaggaaaagcatattttattcccaaggactgaaaaatactggaaatatattttccacccttcttcaaacttatctcacttccccgactggggaaatacccaaatagcaagactggaagaaggaatggagcacacatggcccagcaccaccacctctgcttccgagtgcctgcagtgctggcagataaactcaagtgagagagtaacagcaagtctgatggtggccacaagctaacaaatgtttttcaatccagtttaccaataaccgagctgataaacgaatgcccatttctattgactatttctcaactgatttagaattgaaaagggagaaaaggcgatctgatttaccaccaccaccaccactgttgccaacataaataaaggggccaacagcagggcttcagaaagactagccaggtggcagctggcaagatggactgagggaggaaaaggccagaagcccgtaaatcagttgcggagctaatccaagcattaagtgagtcatttataaccatcaagtattaccagggtctaatcgatacctgctcaaatcaaaacacgtacttgagccaatctgcaagagtaaatcaacgagaacaaaaaactaaggcttaattactaacatatgcatatatacatatgtgtgtgtatatatatacatgtatttttaaatcaattaacatgcttcatatgtaaaattgcttctgcctaccagtaggatcactaattaaaggaaccaaaacaattttacaaagatataaaagagaagcaatcaaaggctaaccagtccagaaccctggagtacatagaagaattctattatgttacagatcaatgtaatataactctaaaataaagagaaagctcatgtaacttgtccacatttttaaagagatgatcacttctgtcagcctcctctaatagggtgtctcttggacttctaaacctcaaaaggttctgctgtcttctaagttagcagcctttgaaaacactgccaagcacttctccaactcacttatatttcatacagcctaattagatcaaatcaagttgcgttaatattgctacatttatataacaaagactgtacattttcactagacagaatcctgattttgcctatacatttggcatccaacactttgttaaatgcctccttattcccccaaaatggaatttatgacaatgtttgcatactcatcactttgtttcagacctcatacaatgtaaacatgaattccttaaaaaaggaggagttgataaaattgtaaacatcagaaaccagtggctaagtgggctcagacacctatggctttctaatgtcttctagatacaaaccaagacttcttattagggctataaaactctcctctaatcaccctaaattctcaaacacaatctttatgccttattattctctgtaataataataaaaaaaagttgccacactagctcatgtctgatcctccttctttatatatgctattatcccaaagtaccacttcagttcctccaaagtaatctggaaatgaaaattatttgcagaggctgaacagtcactctgctactccatccacacactggagactagagtatgctcactaggttcactaagaaacaaatcctgttaaggttttagttaggcagaatcctgagttttgtctacctctctcttggccgtctgtaaggtattttatgggcattttctgtaacctacattcctgagatcccacccaagtttctgtggtagatgaaagatgaaattccctgccagacagaagggagtgaacattatgaggcaaaattttaatttggattaagaaactatccatctggtcccaacaagctgtccttctgaaaaagaactgaaccatatagtaaactccacgttgcaacacacaccacttaaaatgcattcttaaaattacctccttcatgcctgaccaacacaggtgtgatggcctcattactttatgttttgttagtatccacatcagtctgtgtttttttatgagtgctcttggtctaaaataatagatacatagataaatataattaaccttcccttgcacttagattttagacatgtaaattccttaagataggagtcatgtatttggtgtttcctcaaaattctaaatataaagttctccacaaggaatttagaaacaaaatgagaaatataatatttgcatatgatgacagatacggaattccctgcacaaggaatgcatttgctgtcttgatagggtctatacagtgaatctgtacctatgcactctggtctctctgtaagtcattatggtctcctctggtctcatttactcagcatttcctaagcacttgtcaatgtgtcaagcactgtgctagacaatgaactagataaacagatcaggaatggtcctgcactcagagcttggaacctaggggaacctagtcagtcctcatctatctggaaatctgtgcatactgacggctctctcaggcttcctgcaccactgattcccgtgactgtgcatcctcctcatagcagctcctctgccactctacacgactgctgttccaaaaatcactgccccctgtatcacacctgggatgtcacttcccttacaccctgtgcatgttaacattttaattctttttagtccaaaaggaatggcaagaaactgcatggtcagtattaattaaggttatctttctctcattaggaggtaagaaaagtggttcatttttggctgaaagctaatatagacacaaagaacatataaacatgggatatagggggtacatctacacagctagcaactaaataatgctaagtactaagaccaaaaagaatggttggggtctgaagggggtggggaattcttgggagtatcctaaaaacacaaatgtcgtttttgaaataccacgactttagaaatgcaatgagaaaacagcaacctccaaggacagccccttgcattagcaccaaggggttacccctgctccccatcctatacaggtgagatgtgaagcttaggcccacaggagtgcagcagggttatgcctaggggcttgggctaatgccaaaggcaaatcgttctgcactggcataggcaagtgctcagagaagggagaaaggaacgtacctggccttcctggacttcgtcctggctgcagagtcagtgcagctcctcttctctttggcctccttggtgcccgaggcctcccggggcttccgtgccttctttgccccatctttttgcttcggctccttgtgctccttggccttcttcggctccttggcctttctgggttcctttggctctttcggttctcgtttcctctttggcttgggctctctgtccttgcttccctttgctgcaccctcttggtctcctggctcctttttcttccgtttcttcttcactccagtacctcctcctccactgtcctccatcccattatgggatgtcattttcctaggaaaaagggtagcagcttcctcttcagcagtatacaggtccttctgaggcagacagtgactagcaacatcttcaattttctcttcttgatcagtgctgcagtcaaatggggatggagatttgtagtcaaaattgacagaggcatcagacattggggagtgattcaaaacttttaaatttgacaactgtaaaagaaagagaaacaagcatattacccttccaattcatgcttcagacaaagagagttacccagtttgaatacatggatttgctcaacaaatatttactgagttcccactctctgttagttcctattgtgctaggccttggagacagagtggcaaacaggacatacacggcctttacacttgtggagctgtgccaacgtgttgttagcatactaaatcaggatcattcaaaggtaggcctttgattttaactaaaaattgtgctgttctgtatgatcatctaatctagccaccagactgagcaccaaataacctttagccacttgcaaaaaccaaactacctgtataggaggaagttttatggtgatagatgccattagaaaggatgtgtcacaggtgctcaaggcatccctaaaatggaagttgcaaagctgtttttgagcaccaacaaataaaagtacagccccccaaagtgaccactttttaagaaaacatccctttgggtttagaagttatatctcattctttcaggtctggtgttgcaaaaaatatttacaacttcacaacacagctaaggttggtgatagtcggtaacaatgtgggtgttagtttcaaggaacagcaccttctccttggtctggaacaaagaaataacttaagaagagcctgggagggacaagcaggctttctaagaagacagttacaatcatctttgcatgatggcttagaaacagcaccatttgtgaggaacctgctctcttaacaagaggcctggcatgtgctaaagggcacagacagttgcccaggtggcatggtttcccttcagtatgctggttacccaatctgtgctcagacttcctggcccaccctggtagttacagagactgtaacattcagctgcatattcccccttctgtttttccagtttctttccctagtccaatgctcccaaacataacactgagaatcccaggagaaaaagatgaaagaaaggaaagatttttgggggggcggggggcagatctttatcatatcaatacagtccagcctcataagcctaaatacaaagggaattggtcattctgacaggactcactactttcaaaaataaataaataaataaataaaaggaaaacaattcagtttgatgatctcattgctgattgagcacttgagatggctttggaaaaggaggagataagtggacataaaaggaatttaaaatcaaatacaaaaaaaatggttaaggtggtaaattttctatcatatgcttttaccacaattttaaaaactgttttaatgggatacaaggcaagaagaaatccagcagtgaggtgacaggtatccaggtaaagcttggctcctgtgaagtgcagagctgtcctcggaagattcttgaattctgtgccaaggatgcctggccctcaaggaacaagtttttgcttagcatgcaagggtgtacagactgaaaaaggatgagtcacaggtttcttaggctttcaaagataacataaaagatctactcccaccgaggcagctctctgaaggtcagagtgagaccctgtcttttcagctcatatctcatgtccaggacccttttctgaaggacaggggtccccaaagaagctagaagcaggtggcagtaagggagcattcaatccttaggcaatagcaagagctgcagctaacatttattgaaaacatgccatatgggtacactagggcttctgcaaggcatgtttcatgacctgtaatctttataacaatcccacagggtcaatatgaagatgccaattttgtatacagagaaatggaagattagtgatgttaattgatatgcccaaggctatatggctactgagtgcaggagcctggatttgaactttccatctggccaaagctcacacccaattcattgagcattgtatgacctcctggggaactacaatgattgctaggccatgagaccagcatgatggaacttggttagaaatgttaaatgcagccaggcatggtggttcacacctgtaataccagcactttgggaggctgaggtgggagaaccacttgaggtcaggagttagagaccagcctgggcaatagagcaagaccctgtctctaccaaaaaaaaaaatttaaaacatttgccagcagtggtggtgcacacctgtagtcctagctacttaggaggctgaggcaggaggatcacttgagcccagtagtttgaagttacaacgggctatgattgtgccactgcactccagcctgggcaacacagcaagactcaatctcttaaaaataaaaataaaagttaaatgtgatggcatatgcaatcactttgggaaaggtcatgcagttcttgatgaaaaagcagatattagtaataaaatatataaaattataattgaaaagtctaccagaaatgtttgtatttttaaggcaccttgttgggagctttgaaaacatatttgctgaagattaaaaaatataagacaaaaaaatttctttcatgtgtctcaaggtcagcaagggaaaggcaaagagctgaaataaaagctttgtttcagcttctaccaaggacattaaattaccactttgaaactggccctaaaaggaacaggttgaagatgatgggccacaaggtgccaaaaatattttacaaattataacaacagtttaaatagagacaagaatctaggaaaacaggaatgaaatggacaggttccactggtaacacatgcaacaatgctagctcataaactgcactgttagtaaaaaactcgtttctgtgattcaaaattatcaatccacaatattcctggaaaagacacttaaagacttgaatctagataaactggatcaggtcagttgaaaaggagctaagaactaatgaaaaaattatggccctgggcagtggttccaaacagaggtccatggacaaacctttaacaattattcaagaacttgaaagtcaaaatagattctaattaagaaaatcatccagaataatgagcgtatctgctacagaatcttcttcatcagttataaccatttctataccttttcaacagaaagccttgaaataatatgctaaaactcaggcaacaaaaaccattaaatttcagtacatcaggttaaaaaaaattaagcatatttcactgtatttttttgttttgggtcaggaaacatatatttctatctgtaaggaatccatacatggatacctgacaatcattgcctataagctgcttccaagctagtactgttctctatccaagctcctgaggaatagagagagagcctttcactcttattcatataaacagtatttactggccatttacaagtttctttaaatattggcatggcaaacaggcatatatagagatgtgaaggttgaaagggaagatactctccaagttgtgatgacatttccctctcccaaatttaggatgattctttctttgaaagaaaaattaaataaagtgataatataatactattagacttcccccaacttttcctaaaagttgcatattttatgtgaaatatagtaattaaggaatttaaatatttttcatttaaaactttaatacacttatcaaaattaataacttttgcactttaaagaatattatcaagaaagtacagttggccctctaaatccatgggttctgcatctatggagtcaaccgaggattgaaaatatttgaaaacaaacaaacaattaaaaatgacaatacaacaataaaaatacatatttaaaaacaatatactacaacaactatttatgtagcatttgtgttgtgttaggtcttgtaagtaacctagagatgatttaaagtgtatgagaagatgtgtatgggttatatacaaatactacaccattttaaataagggacttgagcatcctcagattttggtattcatgtaaggcgttagaacaatcccccatggacgctgaggaagaagtgcataaagaaaatccccagaataggagaaaatatttgcaaatcatttatcagataagggtctagtgtctagaatatataaagaattcttacaagtcaataataaaaaagaaccaaattcaaggccacaacgagatactattttatacccacctaagatggctataataaaaaagacaagacaacaataattttggcaaggatacagaggaattgaaactttcatacattgttggtgggaatataaaatggtgaagccacttaacagtgtgacagtccttcaagaagttaaacacagttagcaaatgatccagcaattccatcatagatacacacacacacacatatacacagaattgaaaacaggtgtttaaacaaaaacttacacacaaatgttcacagcagcactattcacaatagccaaaaggtggaagcaactccatccatcgacagacgaacaggcaaacaaaatgtggtatgtccatacaatggcatattattcagccataaaaaggagtgaagtggggctgggtgcagtggctcacacctataatcccagcaaaggggaggccaaggtgggcggatcacatgaggtcaggagttcaagaccagccaggccaacatggtgaaactccctatctactaagaacacaaaaattagccaggtggggtggcatgcgcctgtaatcccagctacttgggaggctaaggcaggagaattgcttgaacttgggaggcggaggttgcagtgagctgagatcgcgccactgtactccagcctaggtgacaaagtgagactctgtctcaaaaaaataaaaaataaaaaaataaaaaaggagtgaagtactgaaacatgctacaccatggatagaccttgaaaacaggctaaatgaaatcagccagacacaaaaggccacatattgtataattccatttatatgaaatgctcagcaaaaaacgaactcaaagagacaaattgggggttacgaaaatgttctgaaattaaatagtggcgatgtttacacaatcttgtgaatattctaaaaaccacaaaattgcacatttttaaagggtggattttatagtatgtaaattacattttcattttgaaaaatccagtactaggacataccaaaattggtgctctcaaatattgctggcaagagtatcaactattaaaagcctttttttgcaggacagagtagcaacatgtagtgaattcttataattttatgttgcctcaacatccattttggatgtacactggactttctcataccagaagtggagcttgttcaagcttgatacagtttctacccttgaccctgcctcctcccagttcctcaaggtggtcaatccagatatctgccttttacaactgcctcctggtgaccacccacctatgggacagccacagagcctacctacgtgtcttgctccactgaccccataccctgcatggactgcccagatacgccgcagtgactccactgaactctaactgcttgctctaaacccagcaattagaactccctgcaggaaacctgcttgggtaatggttaaccgcctggaccctaatgaaggctttgatccatgggttggttcatctttctttcttgctccccacacactgactgaacatgcgtgccctggatagctcttcgcttctcactggctctgtgaggtgtgctgctctcttctctctaggatctgcaagtaataaaactgcttctgttatttcatgttttgttatgctgtcttctctgtatctcacctgactgacacacattaacctaactctcctcctgatcaaggctctcctcgagagtggttatcttggtaggaataaaatggacccaggacacaggttagacaagagccacaaggtgtctgccagtataagtaagtcttctgtgagagggacacctggtcactggtcacttgcattaggctgcccttcaggatagagaagtatccagtgaaaggcacactgtaaacacacacgaccaccccactggggccccatgagggcagtgctagaaattacagccactgcccagggagtgaccttaagaccaaattagataaaaatacaacaaaacaatactaaaattttaattgtggatatccttttaaacagggcaacttctcttctagggcataaataaaggaaacacataataactccaaaggattatatataagaatatctgatacacaattgtgtttaatagagaaaaaagctataataacctgtttgccaatctttaggaaaatatttaaattaatagtacacccatcatctggaataatactacgcaaccattattatacggaggtttaaaagacatgaaacatgtctacatttgggaagcaaaaaaagaaaacctatggtctaatcacatttttgtttttaaaaaatactatacgaatgctagctttttaaaacaattttttaaagtctgcaagggcacagaccaaatgttaaccatcatcatgtctgggtgatacgactgtgggcagctttcacttcttttttgttctttgtttttacctgtctcccatgagtagaatgtaagcttccagaggcagtgattctgtggtagtatctagaaaagtacctggcttatggtataattcaatcctgtggttactgaatgaaagaaacagttatctacaatttggaaaagagaaaaagggagtctatagaattgtacatgtaaacagaaatggcaataaatatctgtgcatagaacaactaatggaaggaaaacaaaatgttaatagtaatcatctgaggctatgcaaatttggctgtttatttctaatagacatctacgatttcaataatgagaatgtattactttcatggtatttttaacagaaaaactttcatatacatgtaatagaaaaattttacagacttctataataagcgggaaaaactgttttaccagacaatccatgtttctcccaatcataaggattcaagaatcaaaggcagaatgagaggtgtcagcactgagagattacatttgactgaggtgcaggacaaagtgtgcactttgcacctgggctggaaaggccaccacaaacccttcatccagctgtgcttccttgcacctccaacccaagtagtgagcaaggcctcgctggctcctgctgctggctggctttggagtcttctatcttctccagcagggagaagatggtgttctgtgttagaaattagctaaacataaaaacgagtagaaaagctcatcaaaatttgcaaccttctatgtttttttaaagttcaaataataaaaatgaaaattcaaaggaagtggtaactgtttctattaataaatcagtttgtggacaacatttcaggtagctaaagttatttcctaattaaaattaggattgttttatttttttcaccttcactttcttctgaaagattttttttaaaacaggcatttgactacagaacatactaaatgtagaaaaaaaaaaaaaacccacatgtcctcagcttttattttgctgcaattgtactggaacttatccactcagcaaagacatctgtgtggaattagcaagactgaccagagtgggggcaggaacaatgtctgtccgattgtgcatttgtatgtctctttctctctttctttttctgcatttagtatacagtcagtccccgactcataatggtttgatttatgaattttcaactttatgatgggtttgtcaggacataacttcatcgggaagtccaggaacgtttctatttcaatctatctctactgaggagtcctgtgctttaggtgacaaagcaggtactttgatcctggtgttcttcacatagtcacagctggttagacagttcagttgcaggtatttaaggataattcaggtgcagaaatccagtaggttcttggataattttccaagaaaaatttctacaagaatgaattagactgcccagcaagaataaagagagaagagaaaacaggaccaaatcctgacacacactaacgtttcaggatcaccagaggaagaagaacctacagagtgagaagaaacagtgagataagtgaagttggtgggaaaaaatgtaagactgaaagcagggtatccctgaagcctgaagaagagagcatttcaagacagaatcatcgcaggtgtcaaacgctgctgagaagcaggtaagtgaagcactaaagagtggtcaacagatttggtaatgtcattttttcaaaacctttccacccccaaatacttgactctgtcgtttttagtctccacctctacttccatatttttgcaattaaaatggggagacggggacaggagatacttttatgatgtttcaagagtcttagaaatttgaaatctctaaatatgccgtcaacctaattcttgttaactctaggcagtaacaaaaactgtgggctagtatatggctaaatttagatgctgacagggaagaattaggaggagagagggaaaataataataagtgcctgtgttgtttttggaaactacttttatttccaactatggctttgggtagaccaaaacctcacagtaactcaatttcctaatctgcctaagtggaatgatgtttgctccaccaacaaaggccaggagatacatcttttagaattatttggtgatatattctaggacaagtagatgctgaacagaatctagtggggtgaataagactattttcctacctcttcattcctggcccacatgtagttttacagtagctttgggctaccagaggccctaggcccaaaacttaggccaactctgctcctacccctgccacataataaaccaggaccccggcctagagttagaaagactgtattcggctgggcgcagtggctcatgcctgtaatcccagcactttgggaggccaaggcgggtggatcccaaggtcaggagatcgagaccatcctggctaacatggtaaaaccccgtctctactaaaaaatacaaaaaattagctgggcatggtggcgggcgcctgtagtcccagctactcaggaggctgaggcaggagaatggcatgaatctgggaggtggagcttgcagggagccgagatcgcaccactgcactccagcctgggcgacagagcgagactccgtctcaaaaaaaaagaaaaagaaagactgtattcatggataaggaattgttcttttatatatctcagccttgtagtcacaatgactctaaccacccagaattgttctgatattttacacataaaatggatgccaaggccaggcacggtggctcacgcctgtaatcccagcactttgggaggctgaggcgggtggatcacaaggtcaggagattgagaccatcctggccaacatggtgaaaccccatctctactaaaaattcaaaaaactagctgggtgtggtggcgtgtgcctgtaatcccagctactcaagaggctaaggcaggagaattgcttgattccgggaggtggagattgcggtgagccaagattgcgccactgcactccagcctggtgacagagtgagactctgtctcaaaaaaaaaaaaaaaaaggatgtcaataataataatagttaattttactaacaaatgggtattaggaagatactaagcttattaaatgtatcaccaaaacaaccttaagatagaggcatattatgactccattttacagagtagaagcctagagaggctaaataactcaacttggtcccacggctagtaagtggtaaagctaagatttgggatttgactcccatttcaagggccattgcttttaatcacttcacactgtctcgtgtactggatacaacaaacttagaaataagaatcagcaagaacctctaaccaacctctattttgtttccatcacccattccccaacacacctgtatctctcctcaacctttccccagatgactttcaattcactaacttttcctcttctatccatttcttcataaatccacttgttctccagatcagatgagaaacatatcaagaataaacaatttattaagtggacatatattaaataaatgtagtaggacatatattaaataaatgatgtctaagacttttcagcttcacccagaagggtcccaagatgagggtcattttaaacatggacttggcagctaccaaagatctacaaccaccatcgtaagaatgtagtttgttagcagtagacatatttcttttatccttacaaaatgagaacgttttattctcagtatctaaatattacgtagttcctggatagtaagttcatgataaagttacaaaccatatcaaaatgaaaaagacgttcctgttgcacttttggttttttcataatactttaaccctttgggctagttttcccaaggatgaatcaaagttatgcagagcggccaggcacggtggctcattcctgtaatcctatcactttgggaggccaagacatgcggattgcctgagctcagaagtttgagatcagcctgggcaaaatagtgaaaccctgtctctactaaaatacaaaaaatcagccaggcgtggtggcgggcgcctgtaatcccagctactcaagaggctgaggcatgataattgcttgaacccgggaggtggaggttgcagtgagctgagattttgccactacactccagcctgggcaacaaagcaaaactctgtctcaaaaaaaaacaaagttaggcagaggaagacgattcttcacagtcacatcaatactcgttatgcgagctaaaaatgtcacagatccaaatccttcatcatcactttgaagctgcttcaaaaacttggtcaccagagcttcccagactcctctggtcaagacaggagacgaggcaattccattagttgtttttaagtagccttttttatgacagtgttttctacatgtaaacttactagacttacagcttctttatgcataggattttaaaattagcagcttatttccattaaaattttgtgtctgtctcataaatgctagtgacgtatttgataacattagtaacatgaattaaatgaaccacagtgcaatttaaatattaaattttaatattaacatataattaatcatactataaatattttaatgttaatattttatactaattaaaatattagtattttaatactaaaatattacacagtaatatgattactatataatcatatgtactgttatgatactatattataataatcatattactgtgtatgtatagtaatattactatatcatagtaatatatgattactatgtaatattttagttaaaattgtgtcaacttacatacaatttactttggtcttataaataccataaataaatgtactggcaaactatgattctagtcaggatgggcctctgaggtcgagttcaaactcccatctcatgctttctaacatacaagcaaagaattaggagagagagaaaataataactaataagttctggagacagggagcttactgcttacaaggcatatggcacagctacgcagctcaacttctccggatgtccttctttatatgaagcctatcctcctctaactctccccacgtgtcccattctcttccacaggtccagcaatagacacatttaactcttttccacgtgatgcccttaagtcttcatttcctcaggctacacagtcctagcttcatccacagctcacatgaaataaatcagcgttattttgccatctcagtgactttattctggcctcgagtgtatgtttcagaacataaagtaagaataatgaaaaaaatatattaagatatgttcaaagaggggaaagcatttaatgctcagacttcttttcctttttggaggagggaggagaaaagaggtggataggtcccttttaagtccttttgaaacatgattctagggtgaggctctttagtcatctaggctagttattggcccagatgatcttcagaccctctgcaggatgaggccaaaaagtcttaaaagtaaattattcactcaaccatattatcaactttgctattcttcctctttcactattctaaattatggatcatgatttagtgatccatactactagtaaactgagtcctcatctctccctagaggatttctgggaccaattcttttgggaattattctttgtcctagttcacccttggtcaccacccaaaattcagcaccacacactaggcctttcctttctcccttcccaccacgtctttcaacttcccaaaaccacctatattactctcttccctcctaagctttcctcctgaggaccctgaagcaaaaagcctgaaacctagctccccacagaagacgctgcctctttttagaacactctcaatttctttggtggggctgaccttcccttggcccccatactctccaattccagagcatgatcttccaccacaaggtaaaactctggctcttccgaggcatatttcatcccctggttacattaatggtttgtaaccaggctagaaatttcttgagaaattgctttagttactactgaacctgaccccaagtagaacgcaaatatttctgaactagtattaataaattaatgctgaaaaactcaacaaattgttcagtgaataaattatacccatattcactccagggaagaaaataaggtctaataatctgaaagtctttgagattctcacagtatatctgaagaaaactcttcccatctttatgttttctagaggacctaagaatgaagggctctgcttacccaactcttggcatggggtcaggaagcaagattctcccgtagttactcaagtcagctccaagccgtcatcctacttataatattatgtatttctattgcattcattgcttattaactgtcttctacactggatatgtggtcccaaagccctcttaccccttaagatgacacctgcctgcagaccatattatacattacataatatttatcattttttatgtttttcccagtgccaagcaggagctgagatgaataaaaatcaatattcctatatcattgtttcgttgttgctaacattaggatgtgccctcttgcaaagaactatttacaaccatattatacatcaatagtgccacataggttttcaatgattagagttcacattttatttttataatttttttctgcctaataatgcttagtcatcttaagaattaaaataacgtatttcttagaagcagtttagttctttttaatgtagataaaagtctatagctctcctgagtgattcacttttaaacgttttattaaaatctgtttttctcacaacgattctttaggcaaaacaaagtcaatctctaaaccctttattctgggcacattactcctattatgccctttctggttaataagaagcacgattatttattactgagttttgatttaatttgtaaaaatctaccatctcaatttaccttggtaagattttgaacaaagaaatgaggaatatcaagatcagagtgtatttacatgccatttttctccagggaagaggaaagtgaattaataggaatgagggtttttaaaaggtggatgttttatttgctgctacttctaacacctcagaatcatggtaaaagacaaagtttgatggttacttttattgttaaactgaaagatttccttgccactgacaaactaaataccaagtactcgacgaattaccccacttaatcctaatcttatgatgtgaggcatgttatgattacttccatttaaatgacagaaaaacaaggctggcttttgtcttccagctcaaaggaggccaaggtgcaacttctttcagtcgtcctgaatcggattcatctgacacaagctgcctccaccatgctgctgaagtttgaccccaatgagattagagtcgtatacctgaggtgcaccgggggtgaagtcgatgccatgtctgcactggctcccaggataagacccctgggtctgtctcccaaaaaggttgatgatgacattgccaaggcaactagtgactggaagggtctaaggattacagtgaaactgacgattcagaacagacaggcccagattgaggtggtaccttctgcctctgccctaatcatcaaagccctcaaggaaccaccaatagacagaaagaaacagaaaaacattaaacacagtggaattatcacttttgatgagattgtcaacactgctcgacagatgcagcaccaatctttagccagagaactctctggaactattaaagagctcctggggactgactactgcccagtctgtgtctgcaatgttgatggccaccaccctcatgacatcatggatggcatcaacagtgttgtggtggaatgcccaactagttaagaagcacaaaggaaaaatttccataaaggttcatttgacaaggctgaacttacccaaaattatacaactaaatcgtaaggtcagagtttcaatcctgttctatggaaatcaaagctgaaattcactccagaacatgagcctcttctctattaggcactgaattctccatcctggagcctatatattgctttaacttgaacatcattttctattttcattctttgcaacttcttgcaattcagttatcagtatggcctaccatcagtatttataagaggagcaggatcaagtctttctgaaagttgctcacttctgtaacctgcttctctatcctatctaatattaacttttaaatgaaaaatcctgttctgttcatcaaaattaccatgaggtccaaaacaaaaacccatccaactgaagctacataacagctggctaacataccaaaggtcttaacatgaaccagtaaaatctcacaagaaaccagaattcattttggtggaatcactaaagaatgttttgatttaaataaatgcttatctccttacaccttatacaaaaattaattcaagatggattaaagacttaaatgttagacctaaaaccataaaaacgctagaagaaaacctaggcaataccatgcaggacataggcataggcaaggacttcatgtctaaaacaccaaaagcaatggcaacaaaagccaaaattgacaaatgggatctaattaaactaaagagcttctgcacagcaaaagaaactaccatcacagtgaacaggcaacctacaaaatgggagaaaattttcgcaacctactcatctgacaaagggctaatatccagaatctacatgaactcaaacaaatttacaagaaaaaaaaaacaaccccatcaaaaagtaggcaaaggatatgaacagacacttctcaaaagaagacatttatgcagccaaaaaacacatgaaaaaatgctcatcatcactggccatcagagaaatgcaaatcaaaaccacaatgagataccatctcacaccagttagaatggcgttcattaaaaagtcaggaaataacaggtgctggagaggatgtggagaaacaggaacacttttacaccattggtgggactgtaaactagttcaaccattgtggaagtcagtgtggcgattcctcagggatctagaactagaaataccatttgacccagccatcccattactgggtatatacccaaaggattataaatcatgctgctataaagacacatgcacacgtatgtttattgtggcactattcacaatagcaaagacttggaaccaatccaaatgtccaacaacgatagactggattaagaaaatgtggcacatatacaccatggaatactatgcagccataaaaaatgatgagttcatgtcctttgtagggacatggatgaagctggaaaccatcattctcagcaaactatcacaaggacaaaaaaccaaacactgcatgttctcactcacaggtgggaactgaacaatgagaacacatggacacaggaaggggaacatcacactccggagactgttgtggggtggggggaggggggagggatagcattaggagatatacctaatgctaaatgatgagttaatgggtgcagcacaccaacatggcacatgtatacatatgtaacaaacctgcacattgtgcacatgtaccctaaaacttaaagtataataataataaaattaaaaaaataaaatattttgggtccataaaaaaaaaagcttatcttaaaggatgcttaaaaataaacaaatgtacagattgctttaagaaatataaacctgctcacataccacaaatgacaatagttttgagggtctggggttctcttcagtaatgtattctttgagatggaatcttgctcttgtccaggctggagtccaatggtgcaatctcggctcactgcaacctccacctcccaggttcaagtgattctcctgcctcagcctcctgagtagctgcgattacaggtgctcgccaccatgcctggctaatttttttgtatttttagtagagacggggttttgccatgttggccaggctggtctcaaactcctgacctcaggtgatctgactgcctcggcctccaaaagtgctgggattacaggtgtgagccactgcatccagccagtaatgtcttctttttaacagcagcataatattccactaggtgggtgtgctatgatttgaacagtcccctttttgacggatgtgtacgttcttttccatttttgctatcatacatgaaacagcaatttaagcctttatacacacagttttgcacacctgagtatatccacaggataagttcctggtacatcgaactgcattccatgtagcgtctgcctatcagctgacaactctttgagctaggacagatataaatccagtttgtaggcagtatttagtcactgctcttcttgttatctggcagcagatgaattaactaattccccaaaccaacctagccgttgaggacagaccagggggtagtccttgtaaccataaccctaacccataaccctaagttaccctattattagactagagttccctagaagcaaactggaaaggtaggagtggctagtctcacccaacctctttgttacagagtcccagtgaaaagcagggatttagataccccaattcccaggctgtcaatcaattctgtaaaagaaaaaccagcccaacagaaatagcccatttccaagagacacagacaggtctcccatctgacctccctgagtgaggtctcagagttcctttgaatatgttatactcatggcatagcagtaccaaccaaggaaagagatcctggcaagataaatcactctccatcccacacgcccttcaaaataccaaatgccaaagagttgatgctcccattcttccaaatatttcactattctctctagggggaacccatccacagatcattataaataaggattctgtaagtaagaatgcttttagtttaaccaaaaatccagaaggataaatatataaaatataaagaattggtcacatctctctttcagaaaagactcagaaagctgttcaaagggaggaaatgtttctcttctacttggctaatttgaataatattctgatatacagttttcattacatttactcctacgtgaagatgaactgagcaacaagaaaaatccatattattaagtcattcagaacagagctctcagttactataatacaggcaacagggaaagtaccagagattaagggataagccaacactgccagtgtctccccttgttgaaaaagcaccaagatacccggatgcattcacttaaaagaaaagtgatcacttacctgcttctcttttttctgtattttcattttcatctattgaaggaagatatttatttctgtaaaacatttttaaaaaggcaaagattatgacaaaacccaaaataaaacattttcaacatctccagattactgtaacacacaaggaaaacaaacaggggattacttctgcagaacatttatgtccaacaacctccagagccgtaagtgtacacctaattagatctaactctgttagaccctaatttattgcacccaataaaatgaagtcaaaaagatattgtctttgtagattaaatcagttataaaagatgttggcatgtatgaaagttagtggtaaccaataaaggaacaaaaacaataacatgcctttactgagaggtattaggagatgggaaggaagtaaggtaagccctcatcccttttggaagaaaacaatcaatgatgtctacaatggaaaaatcaagaaagagaaatacagacaataaaaaagagctaagagttcaatgcagttctctctaaggagtgagacaggatttggtatattatttgacgatttaaaccatgtacatttattacttgaaaaaacaattccattgcaatatttcatacgattttttttaaaggactgattttactctatccaggacataagcccccatccccactgcaaccataatgtccttgacaacactgaacttctcataaatgacttgtgaacaccataaaagcccagtaattgtctttagaggtacaaaagtgtgtcggggcatttcagggaaaagaacaaaccctagtctaggaaacccagaatttggggctgcctgcatcactaactagtactactgcctcagatctgaagctcttaccttcctcatatacaaacaatacaaggattatagaatctcaggcttctagttctagccggaatataaacactgcttcctattttttgttgactttgatttcctgttcatcccacacaactacagaacaccactcactcagaaaaccaaattacccataagtttcctaattatttctcatatccaaatgaatgtgatgtgtaggcattaagtcttaatagagcttttaagattagagctttaagattaaagtgagataagtatttgaggtggtagatatgttaattagcttgacttaattattacacattgtattcataaatgatgacatcactgtgtaccccataaatatatacaaccataatttgtcaatttgcaatttaaaaaagattaaagtgagatagttccaattctaagtaagttcatggcatgttggacgcaaacagaaaaatgaaagacatgattccaatcatccttgggaccgcaattacagtttatcattttaatgtctgtcaatttagatttttctccctctaagagttagaggcattttctattaaaagaaccacaaaatgccatggaatctgtcctagagagacatgtctaccaaggtactgctgtttgcaaagagtgcagcggccaaggaggtaagtagttggaaagcaggcatgatcgggtgctaaggtgaaggggaggagggtagagactaactggctaaatcagggaaaggcaagtccagttagtaaatggtgcttctaagaatcaatgcaagggttagtgtttgataggacagttatttacctgaagaatccataaattccagataaatggtaagtgctctgaaccaacgcagttaaaatttagaaaaaaattatctcctaagcttcattacagtggagtcagttgtaggtaaattatgttagtacaagtttatctcctttatctctattctttaaattatcagaccccagaaaactgacattcttaaccatcacaaactgccacaaagtcaaaaataaagaagtttgggggaaaattccagctaataaaaaagggtattaacaataagacatacgtgtagaaagtaaagagtttcctcttcaaagttccccttcttgttaaagaatgaatcataagtgttagaagtagtagtttcttttaaagactacctttcttcaagcctccttggtttgggctaataactctttgtcaggccctgtcctaagtaactgttggacatgctcacaggcacgttccagctcatagcctatgcccattccttatttggaaatgttattgcttccttaaacctttcataagcaacttcctctccttctttgttcttccccacacttacctatttaggaaagttttaggctattagcaaatcgggtattagtttaagagcgtgaggtctagctccagccaatggatgcaggacacggcagtgaggatgatccaaatgtgtaagggataaatacatctgcttttcctttgttcaggtgtgctctcaccattgtttcatctgcgattgcgtaccctttctgcagaaagtaaagatcgccttgctgagagatcttttgtctccgtgctgacttttctttgtggcactgattatttctaacaattttggtatttctaacaatatgtctcaaataaaattctgcccaacaaaatgaaatcattaaaaattacagaaaggtcaggtacaatggctcacacctgtaatcccagcactttgggaggccaaggcaggcggatcacttgaacccaggagtttgtgaccagcctgggcaacatggcaaaaacttgtctctatagaaaatacaaaaattagccaggtgtggtggcttccacctatggtcccagctacttgggaggctaaggtaggaggatcatctgagtctgggaggtccaagctgcagtgagatcacactactgtactccagcctaggtgacagagtgaggccctgtctcaaaaaacaaacaaaacgaaacactacaggaaaactctaccaatgttaataaaaaattacttttgtaatgtataaagaactgatacaattatgatgcagcagggacatcagaaagcacaatttctgattcactaccacaaactagcactggaataaaaacaagcagggcacctaacactgccaggaatgtgggaaaacaggtcctacttataattgctaatggcacttttattttttatttatttatttatttatttatttattttattgatcattcttgggtgtttctcgcagagggggatttggcagggtcataggacaatagtggagggaaggtcagcagataaacaagtgaacaaaggtctctggttttcctaggcagaggaccctgcggccttccgcagtgtttgtgtccctgggtatttgagattagggagtggtgatgactcttaacgagcatgctgccttcaagcatctgtttaacaaagcacatcttgcaccgcccttaatccatttaaccctgagtggacacagcacatgtttcagagagcacagggttgggggtaaggtcacagatcaacaggataagaatttttcttagtacagaacaaaatgaaaagactcccatgtctacctctttctacacagacacggcaaccatccgatttctcaatgttttccccacctttcccctctttctattccacaaaaccgccattgtcatcatggcctgttctcaatgagctgttgggtacacctcccagacggggtggtggccaggcagaggggctcctcacttcccagtaggggcagccgggcagaggcgcccctcacctcccggacggggcggctggccgggcggggggctgacccccccacctccctcccggacggggcggctggccgggtggggggctgattcccccacctccctcctggacggggcggcttgccgggcggggggctgacccccccacctccctccccgacggggcggctggccgggcagaggggctcctcacttcccagtaggggcggccgggcagaggcgcccctcacctcccggatggggcggctggccgggtggggggctgacccccccacctccctcctggacggggcggctggccgggcagaggggctcctcacctcccagtaggggcggccgggcagaggcgcccctcacctcccggacggggcggccggccgggcggggggccgacccccccacctccctcccggacggggcggctggccgggcagggggctgacccccacctccctcccggacggggtggctgccgggcggagacgctcctcacttcccagacagggcggctgccgggcggaggggctcctcacttctcagatggggctcctcacttctcagatggggcggttgccaggcggagggtctcctcacttctcagacggggcggccgggcagagacgctcctcacctcccagacggggtcgcggccgggtagaggcactcctcacatcccagacggggcggcggggcagaggcgctccccacatctcagacgatgggcagccgggcagagacgctcctcacttcctagatgggatggcggccgggcagagacgctcctcactttccagactgggcagccaggcagaggggctcctcacgtcccagacgatgggcggccaggcagagacgctcctcacttcccagacggggtggcggctgggcagaggctgcaatctcggtactttgggaggccaaggcaggcggctgggtggtggaggttgtagcgagccgagatcacgccactgcactccagcctgggcaccattgagcactgagtgagccagactccgtctgcaatcccggcacctcgggaggccgaggctggcggatcactcgcggttaggagctggagaccagcccggccaacacagcgaaaccccgtctccaccaaaaaaatacgaaaaccagtcaggcgtggcggcgcgcacctgcaatcgcaggcactcggcaggctgaggcaggagaatcaggcagggaggttgcagtgagccgagatggcagcagtacagtccagctttggctcggcatcagagggagaccgtggaaagagggagagggagagggagaccgtggggagacgggagagggagagggagaccgtggggagacgggagagggagagggcacctttttttttttttttttgagacagtctccgctaatggcacttttaactgtttcaagctttctgaagagcactcaggcaatgtgccactagatctatgaacgttttcaatccttttataggccagttccactttaaggaatatctcctaaggccataagcgggtaggaaatgaacctgacccctaggggaaaggtcagagatgaggtgggtgaaatgtgaaaatatcacatcagccttggctagcctctgaggcagagagaatgtgcatgtgaaatctgaatgatggcgatgttactgtagagtaactgtctagttcactgaaagcagactctggcaaatctcatgttactgtcaaatcatttctggcaccccaacagatcacaaaacacaccagcatgctgccaccccacaagataacaaacgtcatcaacatcaataggtgttcaataagcatttattgatttgtccttctccagacagcaccccataatttataaacacccttaaattatctctactttttaaatctttttaaaggcacacattaaaaaatacataaaacaatgtcatctttttgtaaggctaaattttatgtactaggaatagatgaatagatacaccctaaagcttgtacttctgcacaatgctggaaatggctttacagtctctgctgccatcactcagaagttctgactagatccttctggctcaataaagaacaaatcaaaatgtaatttcagggtctcaatacttaattagaaacataatacagataattctacagataactccgtgtgggcaaaccagaaaacttgtcaacagcggaaaatatcaagtgtataacttctgaactggggaaactggtgggaagctagtgggactcccgctctccttgctgcattatgtatgagtgcttccgtaggagcacggcatttaattatcttcacaagaaggtaagctgctaatgatgtgaaaacaaacaatataaaagctcccattcctcttatactcacccatctaaggatgctcctattaagaaaaatgggtgccaggtttcaataagaacattttgaaagttttcttttctttttttttttaaattactatctctctctccagtccaaaaaatctgcaacagtgcctgtgccatttccaagttcctcagtgttgtgtaatagtaacttttaaaaaataacaaaaaaatcaggttcaccctattcaaccatttattcacagaaatgatttaaattcactataccttgagaactctgccatactaacaatccctgctcagtccaagggtcgactgcattacaagagtgtgtgtttttgcaaacacaaacaagtgcatacccagcagacccctaccaaggtccttcatattcacagaagatgagagtagactcaactgaacacaataacgatggagaattctgctgttaacaggcccctatcccccaccactctatcaggcactttgagacagagtatgtgggaagcaactctaaaaatgagacccacctcaaattttccacagtgaacatgtatttttataatctactcatgcccatcctcaaccttgagattgtttcctatgaaccactctaacaacagcaggcataaatagggtataccatggggattttaggaatacgaataaggacacagagagtaactcatctgggaagagtgagataatcaagaaagcagagatgtcttgaggaatgccaccttccttaaacccctgcccaaatacctcttatcaagactcctgacctcggaggcagtccagtgggtaagaaatcccccaacttcccatttccccaccttactaccctccacgcccacaaactggacacatgtacctttctctattgccaggtgtgagcagtctacaggaggtactttaatagcaaggggttgaagtaccagaaagcagtttggatctgggctgtaatgacgacgagacatgtgaatgtcttctcccctgtaaaatgctgacaacatgtgcctcagagggcctcaggagaattaaaagggatggcaatctatggcgtctgccacatggtgaagactagctataggcagctatttgtgctacctgtccttatggtcatccctccagtgtcacaggaagaagacgtaaatgacgaagaagatgttttaatgatgtaaaaacaaacaatataaaagctcccattccttcttacactcaccatctaaggatgctcctattaagaaaaagggtgccaagtttcaatcagaacattttgaaagttttctttttttaaattactcctctctctccagttcaaaaactctgcaacagtgcctcatctcctggggacaagtaacctttccatctgtatttgagatccaccctctctcccccttctcagtcacctcagtctcttgattacctcccagttactctttcctcatttcattcaggactctcctcaaatatcaccttagcagcaatgccttccctagccagcctacagaaaacagcacccccacctcccacccaccaccactctgttactctcttattctaatttcattttcctccaccaggtacttattactccctgatattatattacagtaataccttacttaatgtccagactcttggaaaaagctacacctttcagtggaacaacgactttaagtgaaacaacttaaggcaggtcctctaatcaacattatttcattacaatgttgatgagaaaaaaaattagtttccttaaatgctgttttgcttaaagtaaggacttcctatgtatctatttggttttaagcttattgcctgttcctgacacacacacacacacacacacacacacacaaagtaaactttgtcttgttcatgctatactccctgagtctggaataggattgagctcctagcaggtgtgcaataagcattctttgaatggaagaatcatttcttctccctaagttatcactaaatgtctccctttgtatagctctcctcctctcaagaaagaaacaggtttaactctatctcaaaacagtaacaacatgaacaaatcctctacacacctgaaagttcacttcctcccatattacttccctaaagctgttcttgacaatcactccctagttaccaaacctaatgggcatttttaggctttgagtgctttgcagcattttaaactatggaccatttcctcttcttaaaattctcatctcactggtttcttgatccctctgattgcaggcttctaggcttagcttcctccctagaatcctcctattataaaacccaatccttaaatatcactgttcccagggttcaatgctgtcaataccagaaaggctccctgagttttctactcaactcccaaacttcatctctttgcacaatgaccactgcacatttgcaaatccaagccctcctcttgacctctatgtggctatatccaaccacatcctggccagttcctgagacattccacaggtaccaacaaagaaccccacaactcttccaaaacgaaactcagtaccacctttacacacacacacgcacacatacacacacacacacactctctctacctgctcctgtgttccccatcagaggttaatgtcctgcaacctgccatgccacccagcccagaactgagttatccttgattccttccctttcccgtaactcctttaattccagaatcccttggttcctctccagtcgactccggtttattcccatatatttttgttgtcatttttgcctgaaacagcctcttaagtgcttctctattttccatgtctcctaccctcacccccatcaccctcattgctaccaacagtatgttttcctaaagtgcaaacaaaatcagatgctatctcttcagtgggtattgtgtcttaaaaaaaataaaaacatattcctcataacacagagccctgcataagcgatctggcctctggttcttgtctactgctctgacattatttccaccattcatccaactatactgaacacctgtgggttccgactcctgccctgctcattcaggtcttattcaggccctgccttgtgtggtctcatccttcaaaattcagatctggtgtcatgttctccgggatgtcttccctgacctgcctaaatctcataagcatcttgtgataggcactaaactaaagcagctgtatcaccatgttattatcatcttttacctgtctgtgcatgccattagctgtggagggcccaagcaccctccagggagggaccctgtcctgcagtgtagcactcagtgcctgacatttggactcttcagtgattacctgtggaatgagtaagtgaattaatgggaaagctgtgtttactgaaaaggctttgaactactttcaatgtaactagtgacctcttttttttttcctcctaatccaatcaaatttctcagtattcttccttcacaccttttcaaatacatgtacttagcttaagaattcaatagaaatataaagcctaaaacaaataaaaaaaaaaacagtccccgattctactccccactcctgattcactattcccagaggcagtcatttaaacttcagctgttccttctgctcctttccattctattttaaataacatggttattactgctattagattttcttttcgattttaggcattattttattggcttcttcctatggaacaggagtcagcaagtatttttataaaaaggccagataataaatattttaggctttgtaggccatatggtctcagttgcaactactcaattctgctgtgatgtgaaaacagccatagacaaatatgcaaacaaatgggtatggctgtgttccaataaaactttttttcaaaaacaggaagtcctcctactatagaagatgaagtgttatcttcccaatatagttattatcacccttatttattaaatcaacatttaattcacagctaagccatgaactatactttgctgaaactttgtgtcatttttttccctgaagataataactacctcatttaaaaatttgcatggttttctatgaatcactaacttctcctaaaatgctcctctaaaaccttgaaactcctttcaatctaagctcaatgttcttctcttgggtcattataggtagagtcctccatcaggagtccttcatcattgtctctaatctgcctcctgggacttctcctcaccatcctcccagagactcactccctcagtctctctccatggtggactcctaggtttctcctctctaggtttacactctcattttagtgaagcacaacatctagtaatgctctagaaaatcctaaaaatgagatgtaagtttttaagaccttcatgtctgaaaatgtttctattctatctggatggactggtgggttgcaaatcacaggctggaggtcaatttctccttggaattttgagagcactactccattgttctattccttccaccacttattttgaagaatctgaacaattctgatttctgcccatttgtatgtgacatctcttcctttttggaaagcttttagaatcatcttttcaaaatgatgtgccttggggctattttcacccatgaggttaggtacctggtggattctttctcaatctggaaactgtcagatttttcagttttgagaattcctctggtattatttcttcataattccctccctattgttttcttttaatggaactcatgttactatttgaatgatggaccttcttggctgtacctctaattttctgtctcatttacaacaaaacaaaaaaaaaactcttcatgttctactttctgagaagtttcctcaactttctctttcaagccttcttttttctttatagctaatatgtttttaacattcaataattcttttttgagtgtgctctgatattttatttttatagtctcctaaactcatgtcaactaaccaataatggaagggcattcaaatgacaaatggttactcttttctttcaaagatgaccctgtggtctagtggaaacatttctgcacaaccagaatactcaaactagcatgaggaaaggcttctgtaacagttttaaggatttctcatatattcaagctctggctgagaatatttttgccttaaaggtgccagagcaccaaaatatactgagggtttgattttttttttttgtattatgaattcttttagatgcccaaaagttttctttgaaacatacggcaatttgtaaattagatcaacttcggtgaaaaattatcttttgtgtataagtcaggcaaaagaaagtctgtataggtaaatttctgatgttctctactacaggctagagaaaacctatcaccttaaactcaagacgacatgtcaaaaaatatccttatctgtaagattaaaagagggccatgaggacagggaccgtatctattttgactattgtctaactaatattagcatagtatttgataaattagtaaatatactaatagcatatatggacttatcaatagtgggtcaaaagagaaagatcttacacacagctgtaaagcttggactaaaaatccatctctccaaaaatgtgaacacctaacttaaaatatctgccaaatattacttgtgagaaggcactagtactgtcatcacttccaaactgaggaagctctgtgcttggccggtctgaaaggatgcattaccatcattaacattaagactctactcctcaaaagaagtgttttaaacattcaacgaattaattttagagtaaaagctctgttaccctgcatgtgggtaatataagccaaaaggcaaatcaacagtagtgattttaatccttgtctgtgaggagatggcaaaagccagtagtagaagtgacaacaacctcctaagaaactctcactactgaaccaagagtattaggaaagcccattctgagaaccttcctgtgggccagctgctgaataacaaggcttttactcactgaatgactctcctctggctattcaaagtaattactattaacttgaagcagtatcctatgttgctataattcctataacctgttttacctgagatgatataaaggtataaactaaggaagctttctatagtccagaaatacctcaaacaatgccacattcgcacaatcagaactgaatgggatctctgaggtcacatggccaaactctttgatttcagtgatgagtgaggcacattcgcacaattcaagaggagaaataccaactccagttcatcttccttggtcagaaaaaaatcatttctaaatcctaatctgctcataaaaatcaattagcttgataataattactattaagaagaacagtagaagcaagtggccagacccttctagagctatcatatatcacattgtaaggtaaaatctgactgtacttttttgttgttgttggtccctatgtcataatgtcaattgacccagatcaggaatgaacacagctgtgaacacaggactgaataaaccaatttcttgacagccaagcccattcaagcttcagagccctgaaaattcaagtcataatcttatgggggaagacaaagggttttacaaacaacactctatatattcagtttcaagaggtctcaccagtaacacaagaacttttcactcattacattttaatgtcttttgtggtagaacagcagtacctgtagacttgggagtgaagatatctgggttctgaacacaagcgttgtgggatttgggcaacttatttgatctccctgggtctcagtttcttcatttacagaactggtacaaaagccaatcatatgagactgacacatgggctaaaaacaaaaagttactctgttaacattgaaatgagaagccatctacaaaatagcttaaacatgttttggggcgctaaaaatgatctagatgacattttctcttcccgttttccaaaacagcatataagacacaaaaaactcacaactcccaatgtaaactccctcttgggggtattttaaaaacagagttataaaaaagaacaaactacttatacacacaacatggatgaatctcaaatgcattatgctgagtgaaagaggacaaattgaaaagtctatatactgtatgatttcatttatatgacattcaagaaaaggtaaaattgtaggaacaaaaaacataccagtggttggggttggggacaggagagggtcaactataaagagaattttaggggataatgaaactgttctatatcttgattgtgatgttcattacacaacggtatgcatttgctgaaactcaaagaattcctcaccagaaagcggacatttttccgtgtgaaaaaagttaataaaatttttaaaaatcttacttaaaggctatgttaatccaaagttaatgagtaattcaattaaaaaattgttttctaaacacccaacatgtataatgggtgaccaataggtgaagaggaatcagcaaaggcaggtgaagtttggggctggagataagtgatggagagaggctctcaaaatgcctggctaggcagtttgaattgaatcttctatgtaatggggagccattaattgaagatttctgagaaaaggacaaaaattatcaaagtttgtttgatgtaaagattcatcaggtaggaataggtagggcaggcttggggtccaagaagaccagtgagtcatacccaggtagaagtaacagtaaacagcaggctagcaaataaaacagaagagaagtcatggagtccaagaaaatgaagataatggattttttttttttttttgagatagagattcactattgtcacccaggctggagtgcagtggcgcgatctcagctcactgcaacctctgcctcctagattcaagcaattctctgcctcagcctcccgagtagctgggattacaggtgcctgccaccacacccggctaatttttgtatttttaatagagacgggttttcatcatgttggccaggctgctcttgaactcctgacctcatgatccacccgcctcggcctcccaaagtgctgggattacaggcgtgagccaccgcgcccagctggattctttttaagtggcctaagatgctagaatgctggtattggcaagaggcatcagggcacgagaaagaggtaacttttgggagagtagatggataagttctattacagacaggctaaatttgaaggaaaagtgaagactgagtcacagtgagaaagaatccaaggctcaggcaatgtaatccttttatcttaagataatgaaacttagggttagagctgtcaaatgatctgcccaaagcttcacattgactccgaagtacaataattagatttcctggattccaattcggctctcttagtactacatcaagctgccttgcagacaaatgaaaataataaagtgagagatcaggactggaaatgttctatttggggcgctcagagagtgggcagaggttggaaaggtattctacaaatacaacagtctagaagtgcagcagtaaagatgaaatgaaattaacaaaggctgaccaatgataaatatcattctatggaaagtgggagaacaagtacaaagagaattctaacttttctagcctgggagactgggaagatgatattagtaccattaagagggaaaaacagtcaacaggaagagctggctccatggagtaagacaacgcatttggttttagacatggtgactctgctgacatccatgagaagcagttctcaataatggctgaagcacattaaaaaaaaattcactcccatctccaaaagattccaatttaactggtctgaggtgacaccccacataattttctaaactctctcagatgactctaataggcagccaggttggaggacctctactctggaaaaacatccgagcagaaactcaaccatgaaatcactatgccatgtactctccctgacagattgcattttctagtacttattagagagtaggtagggggaaaaatgaaggggcagtgagatagtgagggaagggataactactagcttttggggggaatggaaaaaagtctccaaagtcccacacaatggtttgtgtggtgtaaagcctaaaattcaggcccaatattatgtgctgccttggtatctgaaactggaaagacctccaatggtctatccccaagttcccttccccactctgctcctgtggataaggtcccctaaccaaacctccatccttactgaggggaccatgtgcagttccttcttatgcccaagtagaggatttccatttcttgccagcctgtagaattactcatgcaagtcaatcacatcctcccatgggaaccaggggtcaccccgtcctcttggtactacaaagcctgcctcccatagaccctggatgttcacccttttcccaagtacaatccctgtgtggccctgggtggtgtgtggtgtctcctcccgcaggctatgagtgtacgtgaacaataaactgctgctgatctcatctgcccagtgttaggtgtactgtgcttggtcatccctataatcctgtgtcaggaatctcacacaaatggggtgaataggaggtaactaaagcaaatagcatcatgaacaagagggcccaaccgtgaccaaggacacctggttagtttcaacttatttctcttagctaactaactagttccattatatggtgaaggccacatgggacagaatcaccagttgctgctgggcttgcactatggcctacacagctcttaactgtctttgttggatgttgtcatctcttcccaccctaaaaggcacttgtccccaagataagactctgttgttaattgactgtaccctggtgtgatgcgccatcaggtctggcctatgtgtggcaggtgttctctgaggctcctgcctgtaaagtggtaacaacacagtgccttaaccagtaagcacttaagtcccccttatcaagggtcaagctacagctcttcggtcactgtgtctagcctgatgaccatcactggccacttggggcaggcatacacacactgtttatgattgtgtaccccaggaacaggctcagggacagctgttaagtttttggaaagggagaccaccaccctgggggagacttaagcatggctccttggttgtgtagttccagcaaaggtagtggtggtcttgcctgtctcctgtgctgctgcttcccttgctgttgtcatgtacactctcctgatccccaagtaggtatcagtgtgcacgtccatggtggcttgtggttcaggtactgatgaaaaaaaaaaagggggtgagcatttggtaccaggccctcccaaaacacaggaagagagaagtcaaatgctcttcccatgtgaaactcttaacgtgcctgggctctgctcagttctgctgcttaccagcatgccaaggagctaattttatgttcacagggctcaataagccccatccaggccacagacaaaatgaccttgctggatgtggactccaacccaggaagattgactggcactccctgaaggaacacaaggctgctatgaggcgggcttgcaggctcctaaacctctccctgtaactacacagatgtctacagcatgagtgactggatggagacaaacactgaaaatcatactctacatggctaaaaatccaaaatattctgagaaaatatgtaaagagaaaaaagaataaaagtaaaaaagcaaggctgtagcagaggatggtttcaatccaagggtgaagtacacagaaagcaattaaaatagcttgataaaactatcatttaaaaggaccatataagcacattttagacaagatagatagatacttcagataatattacttgatacaaggaaacaaaatatttcaaacaaataactcatataattaaacacagataaaatcttgagggatataaccgtacataattctgtttaaattctttatctacattcatatagccctccatttgaattctgaattgttaaacaaaattgttttggatcaatttatggtaaggaacaaagtttatctgatagctatccaagatggcagggaaacaaagtaaacacattaacaaaattataacagacaatacttagcagagaaaagtttgtactttgagataattaataaaagaaaaaccacatatttatggttgcccaggctcagcactcttcaatctacagaaaacagaagagttggcccaagtggcaagtcaatctataattggaaaacagctcctcaaccaaacctgtggaattcctagcaataaaaagatgggcttcctcctataactctgctgtattaaagtaaaatttttaaaaacccaatatttttccaaagtgtttttttccctttgtttaaagagaagacacataatggattctgaatctgacacaaattccttccattcaggttttatggatgaaatgctaaaacctacttccacatcctacatcaaattacctttgcaaaccaagaaggatgctgcaccctgatggcttccacagtcatttctgcctcctaagagctgttcaactctggcacctcctgcactttccttagggtctgagaatttttgtttaatataaattgagaatgtttttcaaactctggatttttcaaagatgagtatcagttcttaatcccctcccacttccaattcctccttcctagaagcctaagagggagggagtactgaggtaaacacaaaactagtctgttggggaaaatacatagagcaggacatggcatgaggtgaccaagaggtatggaaaaagttctccttgcaaaagcaaacagaaagctctgggtgaatgatgaggcaggtggctagcaataggatcctcctgccaaacaaaaaatgtcctggttctcccaatctggttgtagtacactaaaagcagaaactgcaggcaataagcagaatatttaggaggccactttaggccaacttaagcccatccacaaaaatctgttaacaccatctacaccatatgtgattcatttaatttgcctacaaattggtacagacttggtcacctactttaaactcatactatattagcaaaccactactaacttctaatacctaaataaaactagttgtttgcctaaaagtgaagttttcagattggcatggggcactactttagggggactggtctgagagatgacagaattcatgcccagaatgagcacaagaatcacagaataaagcctgtttgtttcttggtaaacagtaccaatatccagatcaaaaagtaaccattttataacataaacttaacttcttaccatgtatcacctcctgcatatacagtcagccctccacatcctcagaattaaagatcaaaaatatttaataacaataaggcaattaaaatataaaatttttaaaaatataaaaatacaactttttaaaatacagtacaacaactatttacatatagcatttatactgtatcagagatgatttaaagtatatgggaggatgtgagtaggttataggcaattactatgccattttaaataaggaactggagcaacctcaaattttggcatgggatgggtgtcctggaaccaatcccccatggacactgagggactactgtatttatgttacctgttccaatgttcccttccatcatcagtccaagcactgagaaccagctccaatggcatgatttaaggtttttctagatacagatgaccagtttggagtacaacaaatttccaaactgccactctagaatacatgtgcagaatgagactcatatcttcaatcataggcaccttttctcaagatgttaaatttgaaaatgacagtctttactggtggcagtacaagcccagactaataataaaatgaaataaattaaaagtcagtgaactctcattaggttgaatatgaaacccaagtatcaattcttaaaggctcatcaaaatcctcaaggagttggtgcaaagctgggtatcacagacaagtgatgcaggcagccctcaaagagaggaatataaaataataacactcagagggccaaggaactgcccagattcacctttgtgaactcagtatctaggacagaccaataatgtaagtacagtacacatatactagttgggcaagtaggtggaatgaatttatatatgaggggcccactggctaatttcaccacttatgctgttttcttccttcacccccaaatgacttaagggttaaagattataaggaaacaatttttacaaggcagtcattctagattctcagccttctgtgatatgtttgcagtaactcttgccctggccaaatcctctctatgtacaagaataccaccagctattgaaagcacaaaacaacctcatatgctgtatactgggagatatcaagctctgtccacaaaagtggaattagactaatgtgactcactttaacaactgagctttaagcagctggctccactttgaaattcaccctaaattctgttcacagtgtaatgccagagtttcttaacaacctctgttttctgtgaacatgaactctttctagattccatatccatcccttggatccagattcaactgctaacttggtagattccttagcttctgctctcagagttacctactcctgaacaaataacagtactgagctgcttctgcttgaagcttttaaaagctacacactgagtctctcctatcaccaccagttcccaaacaagtctacagttgttgttatcattaactcctatatgggagttacagtgggattccaaatctcttagtgaagaaaaagaaggtctggtgatttgtcagctgtgagaaggatatatcatgacaaagataaaagcaaagacaacgcttacagaagacagcagtgatattttatttagaccaagaacaaagaggtatctgtgaggccataaaaaagcttagaagttgctgcttaaagtcttggtaagaagaatgacagcaaaatgaagaagtgtaagttgctctactgacggcttcagagttaccaatttgataccaaaagaaaggaagtctggccattaattttttttttttttttttttttagacagagtcttgctctgttgcccatgctggactgcaatggcacgatctcagctcactgcaccctccacctcccggttcaagtgattctcctgcctcagccttccgagtagctgggactacaggtgccgccaacacacctggccaatttttatatttttagtagaaacgggtttcatcatgttggccaggctggtctcaaactccttggccattagtatttttgttgaatgaattagatatctatttttagacattaagttagacaaccttcatatggtttttaaacattaaaaaaaaaaggatgagataccctggattatatttcctctattctagactggatcttgttttaaagcttttactttttgaatcaggttacaccatattttaaattttaatgaaatataatagacattataatagaaagcacagctcttcacaaactgcacacagctgtgtaaccagcatccccatccagaaacagaacattagcactacaaatccatactcctttcaatactgcttttccccaaaagtaaccactagcctgacttctaacaatgtagattagttttacctgtcctgtgccttataaaagtggaattatgtaatctgtgttcttgtacttagctattatttagtcaatactcttatatttggcttctgtgccagttatcaatttattgcctcttaactccaaactcacccttcagtactagctctgtaataatggactggactctccagaattcctcctttacagagcacatgatgctaaacctggtcagcagaggcagctggagggacaacgcaggaagaagggagcttgtcttttgggttcaaaagcgctgtgcttttgctgttcttgctcttgctccaaggtctagtgtaagtatgtggggacatatggtagtgttctgcctaccacatgcacaaagcacaaagcacatggtccctcagtgacaccaggcctggtgaccaccttcctgtgctcctgtagacacggacagcagggactccaggcctcacacacacaatagcctcctgatggcctctgctggcttgtatcccagagagttgtttcctgcagccctcctaaaaaggatgccatgtaccacttccctctgcatgcccagctaccaggcctggctcatctggaacccaaagcgttgtttaacagggccttcccaatgcggactctgcatgcctctgcaccttgtagccacagcggcacccaactcccttctgcatgcctacccatcaggtttggtttcttgcttgcccagcaactgtgtattaactctggcccaggcaagcagggaactcctctgccacccaatgggctacaaccacacctttaccaattaaatctgaaccctaaccctgggaaaaaggtcctcttatcccattcagagtataaataattatctgaagttattcaactttaataactaggagagcttagatctgtacttgggacagtataattctaaagctcaagaccctttttttttttagactgagtcttgctctgtcgcccaggctggagtgcagtggcacgatctcggctcactgcaagctctgcctcacgggttcacgtcattctcctgcctcagcctcccgagtagctgggactacagtcgcccgccaccacgcccagctaattttttgtatttttagtagagatggggtttcaccatgttagccaggatggtctcgatttcctgacctcgtgatccacccgcctcggcctcccaaagtgctgggattacagacatgagccactgcaccaggccaagaccattctactaccaccaatctagaacagattaaggacatttcactaaactcttctaaattctatgaagtttgaggcagtgtcatactcgccactacctttcattacctagtatagtgcctggcacacagaaggtgctctgtaactatctgatgaatgaatgaagatcttgacattggaactacccattttatgcaacctaaattctcaaattccatgatttttagcctccatgtattatgttacacaacaaccctaactgggaaaacaatattgcagattattgtgattaaaccatgtaaacatccagaccaagtgacaaagaagggctaaattctgaaagttccaaattaggagtaagtgatacaaatatctgtgacccaagaaagagggttaagacctatgatctagtaaggaaggtaacactagcacacaagtaactggagaacaatgcaaaaagaaaaaaacaaaaacaaacatcaagacctaagctttaaaaacctaagagccatgcgagttaagagactgtataatatcaatgaaagtttgacaatctatttcataaagtaagcaaggactggaagtgaagacagagaaaacatgggtagttcactctacatttcaccacgggaggggtctctgaccataaggcagctctagagaaatcaattcaggtaagggctactgcagcccccagatccaacaaacaaactcccagctctgggcctttagagaccacagggaaaagggcaagagtggattcctgatccttataagcacatgggtaaaagcaaggacccatcactcaatgttcagataaatagtggatctaactttctcctaaatgcaggtcggcaatgccctcaggcaagcaaatgttatttttagctatcactacactgaaaagggaaagaggaagagggaagggaagtgggggtgggggaggaaggaagagagggacagggggtggggagagggagaggcaaaccatctaaaatgtaaattttatgtacttctttgtatgttattgttcaataaaaagtttaccaagggaaaaaagtgaactgttttttcattctcaaagatgacgtgggagctccaaaatgccagcatgggtcctacctatacttggagataatgaaatcatcccctagttttttcttctctgggataaatataccaggttcctagctcctctacttgggtattatttagtcactcatacattttctgctctctcctgaaccttccatgttctgtatactccttaatttacaaagtcaaagctgaactaaggtactttatcaggttaaagtagtatgaaccctcacaaatattcatcaaaatcaagtcaaaccttatgatgaaatactaaaggcactcctgttaacaagttgggaccaagacaaaaatgccagctatcagtgagtctaaagaatatgcagaacgattatgaggtaatataaactggaaagaaaaacacaaaattcttatttatatatgatgtggctgttttatcttgtaagcccttaagaaataacttcaaaaccatgagaaccaagaaaaagagtttataatgaggtaggaaaatagggtctggaggcagggaacctgaggcagggaacctaaggccgattcacgcctacagctaaagccaaaggaaaaccccaactttccatacaaacaaaaggatcgaaggctacaccctttgcaaagccccctccttttccatgtggcccagggaaaaccgatcagacatttgactaggagtgtaactttgtaacttcactttagcctctgattggttgctttccccaatcaatcaggtgtttgcataggaatgtgacctttgtaacttcacttcagcctctgattgcaggccactacttcatttacatagcgtgtacatcaagtaatcaatgggaaacctctggagggtatttaaaccccagaaagttttgtaacaggtcccttgagcccctatgctcagcctgcttccaccctgtggagtgtactttcgttttcaataaatctctgcttttgttgtttcattctttccttgctttgtttgtacattttgttcaattctttccttgctttgtacattttgttcaattctttgttcaaaacaccaagaacctggacaccctctaccggtaacaataagatggccagtaaaaatatatatttatacaaacatcaataactttgtgaaaagaaacctcaagctttcttcacatatgcacctgctatggttcatgtcataaataccaagtgaataccaactggctgcaactgcatacttaagagactggtgccaaaggagggcccatccactcacacagaccagacatgagaagtcaaccttccagaggacagttcagccccacactggaaccgaccccaacagaaaaacaaaaaacaaaaaacaccattaacgcacccagaattgtgctaatatgtccaacataatattcatcttgaatttccactacaccaaatccaatcatttctcaaatttctccctttcattgtatggtttgtccctccgaggagctggtcacctcactcaacaaccaacatgagaagatatacaggacagtcattaatgaaactaaagaatcaactctttttcaactataaagtgaagccaaaataaaaaaaatccttttctaaagatgctatgccataaaatcccataattctatgactcattccctaaaactacataccatgaaaaaaaactttgggaaatgaattattttgaagaaacagtaatatcatctctatttactgagttatttattctctagatgaaaaagaaagcttcttttaatatagaggaaaaattaattctttttttttcttcaagcaaaatttactaaaaaggaaaagctgcacagaagtcaggaaaatgattcaggaaatgtttttgcaggaagacacaaacatctttaccaaaacatgttaggtacttgaagaaattctctgtacatgaagaaaattagccctgtaataataattaccaaaataatatacagcatcaatatttgaatttgtaaacagaataagtaaaagtaagaaatacgttgtctttaagctcatccccactatatatgtagcgaatcaatcccttgaggcctttactgttaagttttaccactggcacaggccacctgaaacttcaaacacaggccaggcgtggtggctcacatgtgtaatccaggtactttgggaggccaaggcgggcagatcacctgaggtcaggagttcgagaccagcctggccaacatggtgaaaccctgcctctactaaaatacaaaaattagctgggcgtggtggcatgcacctgtagtcccaggctgaggcacaagaatcacttgaacccaggaggcagaggttgcagtgagctgagatcgcaccactgcactccagcctgggcgacagagcaagactctgtctccccccagcaaaaaaagaaacttcaaacacagactcaaacacacaagatgagtacacctcagtcagcaccagacctgaggacgctccctcatctttttccattttatccctatcaataacatccaactattcaaaccatcagattgttattacaatgttcagattcttgaggatgtagtcatgttctcacccacacagattaacctcttatcagaccaacacaaaagaaggaccatccaaacataaaaacagagaaagagaaaggtggttaacttttttgtgaaaaacatgcctgctcaaattatctacaactcccatctgaactaacatttggtagaataaatacacatgctaaagtaaaaacagaatgagggacagaaaaggaaggaaagagaattatttaagaatttgttaaaatataagatacattacttcaacaacaacaaaaaatcactaagcaaagagacagcagaaataaacttagaacgagagagtctctatagtatctcctggcttggttctacagagacttgtggccgctatttatcatgatttggagaatttgaaaaattgtttctttggtattggataccagctatttggctttctgctccaaaaatagcctgaaaatatatagctaagatttatctgggtggccgctttgtaacaagcagctttaacttcagtgcaaatagagtccaaaggtcagagtggtatcctgtgtgaatctgtgacctcaagctgtctgctacgtttctcttgatttttccatctactctgacctcaaagattctcctatagaatctgggggctatttctgctctaaggtcaagtaaaaagattcaaaaaaaggttatacattaagaaggactttccaaagggaaagcgctaaacatttgctcctttacgtggacatgtagtgtgtgtgtgtctacacacactacacatatgtgtaaacaaaataaatatatgtgtagcaaacacaataaacaaaacaaatatatgtgtagattattgtatgttgaataaacagattatcttccaaggctagtgggtcagtacacttcagttatttttctagtaatagagacactagacaatccattctctccctctcttggagtacaaattctataatcaactgtctgggttcacatcttagcccttgctagttgttagccacacagccagagcaaatcacttaacctccttaactcaagttttcccatctacaaaacatgacaatcatataaggattaaataaattagtagatgcaaattacaaagtacagtgtctggcacatagaaaacactacatgaggttaaatattgatatttaaacaacagccatcctaggttatagaaaaaatacgtgataacagcagtgagaataaatgacctatatggatttcagtcttcaccatgattcatactcctcaaccaaataaactttagaattttattttcctttattgaaggagcaagccccccacgcccccaatgtagccagaaaccacaaatgcataatgcagaaacacgactctagatcaaaatctgttaccataaaactgtttaaaaataacacattcaaaaacaaatagaggagcacttaatttagcaaactacaacttttaaacattcttatcacaatgatacctcttttacaaggcataatcacataaaaagatatggtgtatagcgaataaatgaatttcctcacagttttttaaaaaagttttttaataaaaaatttccgtgttacttattaacaagatgaaagtttgctcttcttacaatgtagcaatagtgaaataattatttaggtaacaatcaccaaggaatgttaagttcaaaccaattagctgggcgtaggggcaggcgcctataatcccagctactcgggaggctgaggtgggaaaatcacttaaacccaggaggtggaggtcgcagtgagccgagatcgcaccaccacactccactacagcccgggcaacagagtgacaaagtgagactccgtctcaaaaaaaaaaaaaagaaagaaagaaagaaattttctataataaaaaaaaatttcttgctgggtgcagagatgcacacctgtaatcccagctacttggaggctgaggtgggaggatcacttgagcccaggagctggatatcaacctagacaacatagcaaggcccccattagaaagaaaaaaaaaaaatctactttgggaggccaaggcaggtggatcacctgaggtcaggagttcgagaccagcctggctaacatggtgaaaccccatctctactaaaaatataaaaattagctgggtgtggtggcatgtgcctgtgatcccagctactcgggaggctgaggcaggagaatcgctggaacccgggtggcagaggttgcagtgagccaagattgtaccactgcactccagcctgggcaacagaacgagactccatctcaaaaaaaaaaaaaaaaaaaaaaaagtgccaggtgtggtgactcacgcctgtaatcccagcactttgggacgccgaggtgggctgatcacgaggtcaggagttcgagaccagcccgaccaacagtggcgggaaaccccatctctactaaaaatacaaaaattagctgggcgtggtggctcacgcctgtaatcccagctactgaggaggctgaggcaggagaggtgcttgagcccaggaggtagaggttgcagtaagccaagatcacaacactgtactcctgcctgggcgacagagtgagactctgtctcaaaaaaaaaaaaaaaaaatcttaaaaggctaaaagaaacaagagacaggaactcataaccagtcctaagtctggccaccgtccatgaggcatgaaaaactgcagaaggcctacatctgtaaaacacaaaaacatctgatactagtggtctctaaagactatacgtgagatgttttaagcatacctccttgtcagcagaaattctctgcacattcctatggaggtgtgctttccactaagcaatgaaaatctattatcaaagtataaacaagatgtcttgataccaaactgaacttttccaacctccttacccttaggaaaattattcaaagaaactgaccactaaaacatgtttttaaacatgatatatatatttctaagagttcaacagcttgcctctttctacttttcaagcttttccaacactcatatatttttatacaatcaaagaaataatctttagtacaataaaagaaaaaaattgggtttttgttttgttttgctttttaaagtacatttacagcaatctcttctccatttccactattcccaacttaggtcaggctattatcacctcatacttggtatcagtgtagttaaaacattaactgactatatcatagattcataggtcaagtgtatcaccaatttcctttcaaaacttaagaaaacagcagtctactacatgtatagaagatggcactgttcgaatgctataaactactattttgataaaggggttcagcaggcaatacaggcaccaaagctatgcaaagagtgtttatgttttgctctgtaactgtcctttgtatcctttcttgttgggtaaagaaaatagtgaatccaaaatattgtaccttaacaatattttcccaacagctgtctgccaaatatgtcttaccaggctaaactcacctttctgtgactcccttctttgctttacacatctcttgattggctcacccctgtaatcctagcacttagggaggctgaggatggcttgagcccagaagatcaagaccatactgggcaacataaggacgccccatctctaaaaaaaaataaaaaattagagaacccaggtgtagtggtgcatgcctgtggtcccagctacttggaaggctgagacaggaggattacataagcctgggaggtcaaagttgcaatgagacgtgattatgcctgggtgacacagtgaaacccagtctcaaaaaaaaaaaaaaaaaggaaaagacaacaaaaaatacatctattgaacatgttttggccaataatggtaaaaaggagacactataaaaacaacaataaatgatgtcttacctttaggtaagaatgaatatagttttaacatacaattcaaaataagctataaaatgaagtacatttggttgtagtgaaagctaatctgggaaatttatttctctattgatcttattcccctaggaatagggcagattgttcctaaggtaagacagaagagacaacattattgctagcaaagttgaaattaatcagctctgctccctttctgctgttaatattccaagcaaaggtggttacttccttaattaatacagaagtagtagttatatttatccacactgatagatggctttccactgttaaagtccttctactcaaagaacttatcttctaagaacttaaaattggatttgtctaatattcactgttaataattaaggtagaatgcagcagctaacatttactgcattttgtcttaatcatcataatcatcccatgagataggtacggtactattattgttcccattgtatagatgaggacattgaagcacaagacggtcaagtaacttgccaaagataacagatctaataagtagctaagctaggattcaaatccaggcagtctggttgctgagtccacattcttagctgcacatgataggcctgccataatgaaataatatcaccattatcagctgaccacggtggctcacacctgtaatcccagcactctgggatgccgaggtaggcggttcacaaggtcaagagatcgagaccatcctggccaacatggtgaaaccctgtctctactaaaaatacaaaaattagctgggtgtggtggtgcgtgcctatagtcccagctactcaggaggctgaggcaggagaattgcttgaactcagggaggcggaggctgcagtgagccgagatcatgccactgtactccagcctgacgacagagcgagactccatctcaaaaaaaaaaaaaaatcaccattatcaccacttgaagttttcaaggagcaaactgaaaaagtaaatctactagtaccttcttctaaaatccattagtcacattaaatcctgtgaagaaatatttaatgagcatctgctgtatagccagcattgtgctagtagtaaagggaatactggagaagcagaagacagctattccctcaaaaccttattgtcaaggtagggacacaaaacatacatggataactaggagagaaaatgtatgtcttctctgtataaaagcaacttcctcacaaattcatccatggccagccctcacttcttacttgagtgcatttttaagatacatcacagttgactgtggaaacacagagacaatcttcccaaaaactgttggtgggaggggcagtgtgggtttctaaggactaaaaatcattaaataatctcaactcaattcaattacttaaaaaaaaaacctacacctaaaatgtagttaaagaatctacatatccaaatactaacaaaacactacctgcttttaagaaatcagtctcatgagaaagacaaatctgctaacaaatgtcatttgatgcaagagctgatataactaaggaagagtttcggacacggtgagtagaaataaaggagtaggcaattccaaggggaaattcttgataacataaatctttagggtattataaaaggaaacaatatggaaatgtgaaactttataataattgaaaatagtaaagtcatactccaaatcctgtaacaggtgctgaatattctatatgcacaaatatgactccctgcaaaccccaataccaatgtaacagtagtagtctcaacataaatatttaatgtccatctcagtctctattgttctacagtaatgtccaccagtcgatcaaaaactataaggcatatgaaaaagcaaaagcagggaagaacccatatcaaaagacaaaccaaacaagagagccaaactaagaaagatgaccaagatgttgtaagtattggagaggaaatttaaaataacaacaattgatatgttaaaaaatttagtagacaatatgtatgaacagatggcaaacttcaacagaaagatgaaatatgtgacaaagaatcaaatggaaatggtataatttttttaagtcatcagagatttaaaagttcctttgatgggctcataagaacactctacacagtcaaggaagtaatcgaacttgaagataggtcactagaaatcacccaaactgcaacaaaaacggggaaaaagaagtggagggaaacacagaaagaaggctggagagctgtgggatatgatcaatggcatcatatacatgtaactggagtcccagatggcagaaggggatagagggactgacgcagaaacagtatttggcaggggggaaaaaaaggctaagaattctccaaaaataaagtcatcaaatcacagctccaagaagcccagagaaccctacagaataaatataaacaagcacacaaataaatataataaatacaataaagaacacacattgagacacttcacagttaaatagctaaaaatcaaagttaaacagaaaatcttaaatgcagccagagggaggaaaaagacattaccttggaagaagaaaattaaaataaaaaattcaccagactactcatcagattttttgcaatccagaggacaatggagtaattctttaaagtaatgaaggaaaaaaaaaacacacctcacaacgcagaaatatctccccaaaatgaaagcaaaacaaccagttttcagataattaaaagttaagataattcaatgtcggcatacctgcactacaagaaatggtaaacgaagttctttaagtagaaggtatatgacactgaacaaaaatgaggacctacatgaagaagtggatacctccagaaatggcaaaaacagaagtcaatgcgagatctttttttcacatttttaatcattctgaaagataactgcctaaagcaaaaacagtagcagtgtattgtagagattataaaaaatataaaagtaagatgtatgacaatatcatataggatgaagaggaaaaactggaaatatactgtattgttaggatctcatactatatgagaagtagtataatatgggaaggtaggttgtgatgtatcttgtaaatccaaggacaatcactaaatttttataaaaaggtataactaatacatcaataatagagataaaattgaattttaaaaaaccctcaatctaaaagcaggaataaagaggaaaggggaaacaggttagagacaaatagaaatcaactggcaagataacagacttaaattcaaccatattaataattatgttaaatgtaaacagtctatacataccagttaaaaggctgagattatcacaatacccagttatatgtttctataagaaatccattttaaaaacatagataggttacaagtaaaatgatggaaaaagataccaagcacatactaatcaaaagaaagctagagaggttacataaatttacacaaagtagatttgaaataaatattgaaagcaatagagagacatcacataatgatgagttaattcatcgaaaagatataacgatccttaatatgtatgcacctgacatcagagcttaacagcatacgatgtaagaattcacagaattgtaaggagaaatacacatatccataattaacagtggacttaacactccacttctggtaatccatagtgtgtagaaaaaaatttctatctagaagataccaataacactacaaccaactttacctaattaacatttacagaacacctcaccctacaagagcagaatatacattcttttcaagtgaacatggaacgttcaccaatacagcctatattcttggccataaaacaaacctcaacaaatttgaaagaattaaaattatattatccaactacaaaaaaattaaatttgaaattaacagaaagatatcaggaaaatccataaataaaaataaaacacatttctagacaatacatggatcaaaaaggaagtaacaagggaaaccagaaaatacttggaatagaatcaaaatcaaaacaacatgaaaatttacagaatgcaacttaaacagtgcttagacaaaagtttatagcattaaagcttgtattagggaagaagaaagacctcaaatcaattaaacttccacctaagaaactaaaattggagaccaaattaaacccaaaggaagcagaagaaatcataatgaacgaaaatcaatgaaattaagaacagaaaaataagtcgtgaaaaggaaagaaaccaaagcgagttttttataaacctctaagtagaatgatcaagtaaaaaaaggaaaaagacacaatttaccagtattaggactcaaagaggagacatcatgaggtatacattaaaggaaaataatggaatattattagcaaatttctgtatataaatttgaacttagataagttgaataactccacaaaagtgaaagctaccgaagctcactcaagaagatatagagtagccaggtgtggtggctcacgcctgtaatcccagcactttgggaggccgaggcaggcggatcacctgaggttgggagttcaagaccagcctgaccaacatggagaaaccgtctttactaaaaatacaaaattagccaggcgtggggagcattcctgtaatcccagctactcgggaggctgaggcaggagaattgcttgaacctggttgcagtgagccaagaggttgcagtgagccaagatcgcaccattgcactccagccttggcaacaagagtgaaactccgtctcaccaaaaaaaaaaaaaaaaaaaagaaacagagaatttgaacagtcctttacctatgaaagatggtaaatttacagttaaacgccttccaacaaagagaactccaggcgcagatgacttcgctggtgaattttactgtatttaaggaagaaataatatcaattttacataaactcttccagaaaagagaaaaggaggggacacttcccacctcatttcatgaggccagcattaccttgacatcaaacgcagcaaatacaagaaaccatcaaccaaagacaaagatcaaaacaagtgacattaaactccttaacaaagtaccagcaaattgaatcctgcaatatataaaaaagataatgagagacaggactagctggatttcctaggccgactaagaattcctaagcctagctgggaaggggactgcacccacctttaaacacggggcttataactcagctcacacctgaccaatcaggtagtaaagagggctcactaaaatacaaattaggctaaaagcaggaggtaaagaaatagtcaaatcatatatcgcctgagagcacaggaggagggacaatgactgggatataaacccaggcatttgagcaggtagtggcaaccccctttgggtcccctcccattgtatgggagctctgttttcactcttattaaatcttgcaactgcacactcttctggtccgtgtttgttccggctcaagctgagctttcgctccctgtcaactactgctgaacgccgtcacaagacccgccgttgactttcacccctccggatccggcagggtgtccgctgtgcttctgatccagcgaggtgcccattgccactcctgatcgggctagaggctcaccattgttcctgcacagctaagtgcctggattcatcctaatcgagctgaatgctagtctctgggttccacggttctcttccgtgacccatggcttctaacagagctatagaactcactgcgtgggccaaggttccattccttagaatctgtgaggccaagaaccccaggtcagagaacaaaaggcttgctgccatcttgggagcggcccaccaccatcttgggagctctaagaacaaagacctgctggtaacaataatacatcaagatcaagtgagatttatcctaggaatgcaagagtgagtcaatcctcaaaaacatcagtcaatataattcaccgtatcaacagaccaaaggaaaaaccccatggtcatcgtgatacacaaaaagcatgtaacaaaattcaaaatccatttatgataaaaactctcagcaaatttggaacaaaaggtaacttcctcaacttgataaaaggcattgacaaaaaacgtatagttaatgtgaatgaattattttcccttaaattcaggaacaacacaaagacatctaatttcatcacactgactcaatatcatgtgaggaggaggaatcctagccagtgcaataagacaagaaaaaggaacagaagccataaagagtaaacaggaagaaataaaatggttatttgcacttgacataactaatcataacatagaaaattccaaagaatctataaaaagagcttctagaactataatttaataaggtcataggctataagattgacatataaaaatcaattacatttcaacatactatcaagaaacaattgcaaattaacattttttaaagtaccatttaaaatagtgtccaaaaaacatacttagagaaatacttagagacaactctaattaagcatagccttgtaattgttataaactaactttaaattggccaatctcttctgttacagaaatactatctgatagcctaagtagcctaaaccttccaaatgagctgacttattttattcttctctttggagttgataagagaataagtcagcttattcaggattttggaataattagcaagcctttcagatgaatcagctttcctttcagtagagggtctcttctctcatgcttttcattgacaaaggttcatcccaagagttcacaccataaggttagtatcttggaactaggaaacaaaaaaatggtatgcagcctcagaaaattaaaagcttgcaaaagtaaagttctctctggtaagtggggaactgatcacactgaaaactgacaagctttaatactcacttcccaaagtaagtcataatgacactaacgtgtacaaaggatagcctcctattaataacgcagtgacacatctaactgaccagagttggactgcctaacccaagagcagtcaatgcctgaacaggccagcaactgatgacatttctgtagtgaaaaacaaaccaaaaaaaacccaaaaaaaccctgctgggcaaaatagactctctcaaatttgaaatggaatgtaccaaaagaataaagcattaagcaataggagtaaacgctgagaagtcatgaaattcagagaccctggaggagccatgagggagggaccttgggcatggaaaaagtaagagggagcatagtgtataagcaagcagaagctataaagtagaggcaggtagcagcaggtaggatgaggaagccagtaggtgggaaaagaagggtgaggctgacccatagggagtggtgtaaatggcaaaatcctagagagactatccaagaaaacctgcttatgaaagcccctggagttgtcctggatccagcaggataaatgtgttagtcatcatctattgccacaataacgctgaacaacagaccacaaaatctcagtgtcatacaacaataagaattttattttcactcaggcatctgagttgcgctggcactgctttaagttcaggtcggctcaggtggctctgctgtatggtctcacaatgagaaacaggctgaagaggctgtggcaattcagggtttttcttctcatagtcatgacagaggcactagaggataagcccatcagcccaagcatactactaacctctgcttttgtcttgtccactaacatcccactgggccaaggtaagtcatatacccatgcccaaaatgaagaggcaggtacaaaaacccatctcacatgaggttatggcagggtaaagacgtagaaaactactacaggagagtgaggaattgagaccaatgattcagtctcctacactactccacaccacttctctaagctagttaggcctaaatctttgtaccctgcaaactaaaagagtctaactaaacagagagagcaagaaaattttctaggaccaaagacatgctactctagctcccactctctaatgcaatgtcatctaaggaccctgatctcccctttctccccttataggatatggtctaaaattattttgttgaaatatttctaatcaaaaggtgattggggggattcttaagaaagccaggaaaagagacacaacaaaaaaagagaattttagaccaatatccctgatgaacatcgatgcaaaaatcctcaataaaatactggcaaaccgaatccagcagcacatcaaaaagcttatccaccatgatcaagtgggcttcatccctgggatgcaaggctggttcaacatacgcaaatcaataaacgtaatctggcatataaacagaaccaaagacaaaaaccacatgattatctcaatagatgcagaaaaggtcttcgacaaaattcaacagcccttcatgctaaaaactctcaacaaattaggtattgatgggacatatctcaaaatactaagagctatttatgacaaacccacagccaatatcatactgaatgggcaaaaactggaagcattccctttgaaaactggcacaagacagggatgccctctctcaccactcctattcaacatagtgttggaagttctggccagggcaatcaggcaggagaaagaaataaagggtattcaattaggaaaagaggaagtcaaaccgtccctgtttgcagatgacgtgattgtatatttagaaaaccccatcatctcagtccaaaatctccttaagctgataagcaacttcagcaaagtcgcaggatagaaaatcaatgtgcaaaaatcacaagcattcttatacaccaataacaggcaaacagagagccaaattatgagtgaactcccattcacaattgattcaaacagaataaaatacctaggaatccaacttacaaggaatgtgaagtacctcttcaaggagaactacaaatcactgctcaacgaaataaaagaggacacaaacaaatggaagaacattccatgctcatggataggaagaatcaatatcgtgaaaatggccatactgcccaaggtaatttatagcttcaatgccatccccatcaagctatcactttcttcacagaattggaaaaaactactttaaagttcatatggaaccaaaaaagagtccgcattgccaagtcaatcctaagccaaaagaacaaagctggaggcatcacgctacctgacttcaaactatactacaaggctacagtaaccaaaacagcatggtacgggtacaaaacagagatatagaccaatggaacagaacagagccctcagaagtaataccacacatctacaaccatctgatgtttgacaaacctgacaaaaacaagaaatggggaaaggattccctatttaataaatggtgctgggaaaactggctagccatatgtagaaagctgaagttcgatcccttctttacaccttatacaaatacgaattcaagatggattaaagacttacatgttagacctaaaaccataaaaacgctagaagaaaacctaggcaataccatgcaggacacaggcatgggcaagaacttcatgtctaaaacaccaaaagcaatggcaacaaaagccaaaattgacaaatgggaagtaattaaactaaagagcttctgcacagcaaaagaaactaccatcagagtgaacaggcacccacagaatgggagaaaatttttacaatctactcatctgacaaagggctaatatccagaatctacaaagaactctaacaaatttacaagaaaaaaacaaccccatcaacaagtgggcaaaggatatgaacagacatttctcaaaagaagacatttatgcagccaaaagactcatgaaaaaatgctcatcatcactggccatcagagaaatgcaaatcaaaaccacaatgagataccatctcacaccagttagaatggcgatcattaaaaagacaggaaataacaggtgctggagaggatgtggagaaataggaacacttttacactgttggtgggactgtaaactggttcaaccattgcggaagacagtgtggcgattcctcagggatctagaactagaaataccatttgacccacccatcccattactgggtatatacccaaaggattataaatcatgctgctataaagacacatgcacacgtatgtttactgcagcactattcacaatagcaaagatttggaaccaacccaaatgtccaacaatgatagactggattaagaaaatgtggcacatatacaccatggaatactatgcagccataaaaaaatgatgagttcatgtcctttgtagggacatggatgaagctggaaagcatcattctcagcaaactattgcagggacaaaaaaccaaatgctgcatgttctcactcataggtgggaattgaacaatgagaacacttggacacaggaaggggaacatcacacaccggggcctgttgtggggtggggggaggggggagggatagcattaggagatatacctaatgtaaatgacgagttaatgggtacagcacaccaacatggcacatgtatacctatgtaacaaacctgcacaatgtgcacatgtaccctagaacttaaagtataattttacatatatatatatatacacacacacacacacacacacacacacatatatatatacatatatatataaaagaaagccaggagattgggaggccaaggtgggcagatcacttgaggtcgagagttcaagaccagcctggccaacatgaagaaactccgtctctactaaaaaataaaaaaaattagctgggcatggtagcgtgtgcctataataccagctattcgggaggctgaggcaggagaatcacttgaacccgggaggcggaggttgtggtaagccaagattgcaccattgcactccagcctgggcaacaagaatgaaactccaaatcaaaagaaaaaacaaagccagtagacatgtctagaaaatacggctgcaaccattcaaggattttcacagatggaaggtgccgataaaacatacagaccactccactaaggtataaagaatttcaaggctgggcgcagtggctcacgcctgtaatcgcagccctctgggaggccaaggcaggcagatcacaaggtcaggagatcaagaccatcctggctaagacagtgaaaccccgtctctactaaaaatacaaaaaattagccaggtgtggtggcgtgtgcctgtagtcccagctactcaggaggcagaggcaagagaatggcgtgaacccaggaggcagagcttgtagtgagccgagatcgtgccgctgcactccagcctgggcgacagagtgagactctgtatcaaacaaacaaaaaaaaagaatttcaaatcagactcccgtgagtccaatggtcacaggttcccaatatccaaagcttttgagtactatcagcattttcatggtttaaaaaacaaaacaaaacaaaaaaaacttttgtaagtggtattctctacctaatttcttttttttaaaaaaaggacatgaaccacacacacaagaaaagtgggtaaagtcaaatctaagtgtagagtagaatgaaatggcagaaaacaaaatagaaaaacttggaaagttaacacatttaatttgctggagtaataggtaatgtttactgtcttaaacgagagtcttttgagaaagatagttttcctcaaaaataagtaaaatctagatatacttttgaactatgatccatttcaaacaattaatttactcctttttaaaagtattaacaatgacacaatagtagtacttcatttaaagacaacgagtacacatattcatacaaatagaaactggagctaccatgcacactacatttgctgctgttcaaagatttaaaaatgcctgcttctgacctagactatcctggcaaaatctaattagtggtcaagaagtccatgactaagggaaggaacaaaaaggcaatggaacagcactggcattagcagggatgcaacatgagaacacccggggatgccatgacttcccaagattccctgttttacattaggctgggtctaacaccagagggtgtgagctaacataccttagtacaaactctgtgacacataccattataataaatactattacactgaaatcaaagatttccagttctcaggtatctaaaacgtgcccctccaaaactcaatttaagaaataatttaagaagtgactatgtaaaagcacttccttaaaagacttccttaaacaagaaagaaaaaacctatccctccaccctctttgtggcaaaaacaacagaaaaatcaaaatacaatccttctacagaaaacaatttcttgcctccaaggagaagattcaggcattttaaaacagttctttggtatccaaatgttttgataaggagaatgccaacactgtttaactcagcccaatcaaaaaggggggggggggttaaatagtaaaagagggatatggtttgttcatcactagaataaattcagagttataaaagttatgaaattatctcccttgtgatgctcacatggcctttacactttggtttctttacttcttagtctctattttcagcattaatttatgagaacacacaaggagttaagctatactacccaaaggctttctgtatgcacagacccaagccactaagaactcagagatggcactttaaaagcaagcccagcacccacaggggtcccacatgactttggcctacaacactgctacctgctgatattgcagctcttctagcctgtttttctctggtgacaaccccccaaaaacccaactcttaatataataagttttgaaacatgggtgttataagctgcagtgtctgacccccaaattcatatgctgaagccctaaactctatttcctcagcatgtgactgtatttggagatagggtctttaaagaggtaagttaaaaggaggccattactgtgacttctaatccaatatgactggtatccttacaaaaagatgagatgtggacatagataaacacagagaaaagaccatgtgaggatatggcaagaggcagctatctacaagcgaagagaagaaagaaaccgaacctgctgacatcttgatcttggacttccaggcaccagaattgtgagaacgtaatttctattctttaagctatccagtccgtagtattttggtatggccctaacgaactaatgcaatggagaacaaattttgcttaaaaaaaaaaaaaaaatcccatgatcaagaagagatgctacttctaaatctacccttatgggatttttgatggcttaatggaacacctcaattcatctcaattattgaaaaaaacaccacattcataataagcatccctatagtttttatctaacctcataaaggtgttccacagtatcaatagtaaagcactgttggaacctttttacctagctgcagctcacttccactctttgccttctccactatggtattttcaggaccatatgctaaagtggtcacatcccatggctccagcctaagatggaagtcaaacttatatgacaatgttttcctcaaaatttcttcccaaagtgatgtttttggcattcttacaccaatctaaaatcaaagtactggtactgcaggtctctgaagacattgtgctccacttcacacctccacatctgtgcacgagctatcatgccctttgactatctggaaaactcctaataatcttttaagaatcagaagaaactcaccacctctataaagtcttttgaaaaccattttcaccacctaaaagttgacctaccacccattgtgattatttgtgccagaaacaataagttcctcttcaaagcttgcttggtctttcttgctctgtacacaagcccttcctgcttaatctgtaatgaacacttgtttctctgcttaatctataactagcaaatctctgactctgtaaacaacccttcccaactagttggtaatggacagcctctcccttctcgcctaattgaccttattcaatttcaaacactagccaatcgggtcagcttagactgtgtggtccaactccacccaatgggggaaaggacacaggaactgtgttagggataaaaacccctgccctaccctgctcagtgtgttcttgtgatcggacaggtgcaggtagcacccttctgcagaagtaaatgtgtcttgctgagaaactttctaagtgctggtttttctttgtggcactgagcacttgtctctaacaatttgagggatcgtccaggatcccattctcctctggggaagggtctctgatcatctcttgtgaggagatgtgtcccactgccttgttgcagtggcctcaggggtgagggatcgagacccacctggtgtgacgaataaacccagactctcagcaacgcaggaggaaagggcctactgatactgtggcgacccagtaactgtgcacagaccaatgtaagaaaatccatggggcagtgaagtacttccttggtggtcaggacaccctggaagttgaaagtgtgtgaatgagatgcagaattaagtctgaagcaagtgtggagtccagatttgcagttctgtggtcacctcatacagcttaaggtggggcacgcctttcctgtcgggggtttataccaacccaccaatgctaagagggacctaaattcccatgagggaagcggcccaagaaggatgaagggaaggcaaaggagtgcaagaaacctccagtggggtggttgagcctccagagaaagggtgcaagaaatctctagtaagagaggtttagccccacacatgcaggaaactcagggaaacacctaaaacttccaggatgggaaataacccaagcaggacaggaaatataaaggactagacagacaataaaattccctctaatagccctccaggtctcatgttaaaatactgtaagggtaatgaaaggactaaacattagaaaaagcaacaaatgataaaatattgttgttttatttggaccaaagaacccacccttgaaccctcagtttgcttttttttttggccagtttgggtcaaatgaggattggatttgtcaacttctaatagaatatgtcaatgacaaaagtcctgtctcccaggaggaaatagactatgccctgtgctggcggcaggggcctgtcctcctctaccccctaaaagctacaggaaataagccaaaagctacctcccctgaaaacagaatccctacccccaagcagtctaacaccacatgggaccctttagacaaccttcccccacccaccgctctgccccaagctgaacactcagtccctccaccatataaccctgccctgcgggccccgtcaccccacattcctatggagtagtcgcccaaacatgcccctccctcagagaagctccaacgagaaatagaacaatgccacagggacactcacaacttccctttcctctcctaaaaggagtctgccccaaccctttttcccttaagagaagtgccacgtggaggaatgggaattggctttgtaaatgcccccttaactagtttagaggtcagaaacctgaagagggaacttaaaccactattagatgatccttttggggtcacggatcaaattgaccaatttttaggaccacaagtatacacttgggctgagttaatgtccatcttcagtattctcttttcgagggaggaaagaaccatgatccgcagggctgctatgatagtctgggagcacaaacatcctcccggtcaaaatatccctgcagcagaacaaaaatttctggcccaagacccgcaatgggataataacaatgcagcccaccgagaaaacttgaaagaccttagggaaatgatagttaaagggattcaggaatcagtgccttgaacccaaagtatttcccgagcatttaatatacagcagggaaaagatgaagggcccatggagtttttaaacagactcaaggaacagatgagaaaatatgtaggcttagacacagaggatccccttgggcaggggatgtgaaagctccattttgttactaatagttggccagatatcacaaagaaattacaaaaaatagagaactggaaatggaaagatcggcctatagaggaacctttgagggaggcccaaaaagtatatgtaagaagggataaagaaaagcaaaagcaaaaggcaaaaaatcatgctgtccgctctacaacaaagtacccgagggtccaaaacctgtaaagaacttaagcccccactcactaggccatataaagggtatgtaaaagcaaagcaaggaaacttaaaaacagggagagaaagagggcaaaacaaatgtttcaaatgtggaagaataggtcacttcaaaagagaatgtcccaaatgggaaaaagaaaaagaagtcatcccacttacggcctttgaagaagaatagggaggtcagggattctgtttcttttatctcaagtaccaccaagagccccttataaatttagaggtgggacgtaaatccgaactgctccccggaaagacatcagcttatctccttatgaaatgttttatgggttgccttatttaaattccactacggacctcccgacatttgagacaaaggatcagtttcttaaaaactatgtatttggtctgtcttctaccctttcctttctcaggactcaaggcctcctagcgcaaactccaccccttgaattcgcagttcaccaacaccaacctggagatcatgtccttatcagaagttggaaagagggaaagctcgaacccacctgggaaggaccccttatctagtgctcctaacgactgaaacagcagtctgaaccactgagaaggggttgacccaccatacccgggtcaaaaaggcatcgccctctccaaagtcaaggaccatcatcccaggaccaacccccatcagagtaatgttaaagaaaaaagcctaatctgtctatccttttttttttcctcttctctttcccttagctaccccacatctcattattaatataaacgcatcagagtcaccgcaaatcattacttttgatgcttgtcttgttataccctgtggagacttgcgaagtcaaaggcagctctctactttgcccttcttggaaattctcagactgggcagattctattaactggggagttcccttagacttgggatattatttttaaaattctgttaactgggaatcccgtcctctgcaaacagagcgtctctgccatagctggtccaatgttctatggactacgaaaaatcagggttggacctccccaacaagtctctgtgtatccctaaaactatacaattgtttcactaaaggaagcccccccaccaattgccagcaaaactaatgtaatccagtacaaatttccattactatctcaatttcccaaaattcctcccttcattaagtcgtttctagggtatgggagcagaggtcgcaggggcagactctacaggatttttcaaaattagtttcgttgcctcgtcatcccctccgccctctccttcaaaccttctaatcaaactactagtctctccctacaatgcaatggctcccaaagtagccactgtagaagttaaagatttaaaacccaccctagctattgaaacagggtaccaagatgcaaatgcctggctagcacggattaaatattccgtccgcaaactaaacaaaagcgactgttaacgcttgtgcaacgggcaggccagaaacccaaatcatcccctttctacttggatggtcctccgaccaacagggtatgagctgtatggtatctctcttccaaaaccccacagcctggggcaataaggcatgccaaactctcttgctgttattcccggaagttaaaagccctgcgggtcagcccccaagggccatctgtcctccaggtaccaatgtcaatttcacctcgtgtctctcacagcaaggggaaaacttggcattccttggaaatctagcaagatgaagtaagcctaagcctttctaggagctaaccaatcagtctgcccttgttcatccccaagcagatgtatggtggtactgtggtggaccactattgggtactctgccaaataagtggggcaacacttgcgccctaattcaattggccatcccaccctggcatttcgtcgactaagcaaaaaggacaatcacaaaaaaaggagtactccctacgggtcctctgacccttacatttacatagatgccatcggagttccacgaggagtgttaaatgaatttaaagcccaaaatcaaatagctacaggatttcaatctatattgttctcatgggaaactgtaaacaaaagtgtagactggataaattacatttactataatcaacagcagtttgtcaattatactagggatgccattaaaggaatagctgaacaattaggtcctaacagccaaatggcttgggaaaacaggatagccctggacatgatattagccaagaaaggtgggagtctgtgtcatgattggggtccaatgctgtacttttatccctaacaacacagcccccgatggaacaattacaaaagcctgggccttaccaccctagcaaatgaattagccgaaaattctggaatagattaccccttctctggtctcatggaaaaatggtttagaaaatggaagggactcataacctcaatctttaccccccttgcaattgctataggtgtactcattcttgtaggttgctgcaccatacctcgtatttgtggatcagggcaaaggcttataaaaacagcccccaccaaaacccctctcgattctccccctccctactcggataagttcctactcccagacaaccaagaggagcaacaaagccaagatatgttacaaaaatttgaagaggaagaactataaactcaagagggggaaatctgccagacacaataagttcctcttcaaagcttccttcgtctttctctctgtacacagcccttcctgcttaatctgtaatgaacacttgtttctctgcttaatctataactagcaaatctctgactctgtaaacaacccctcccaactagttggtaatagacagcctctcccttcccgcctaattggccttattccattttaaacactagccaattgggtcagcttagactgtgtggtccaactccagccaatggggaaaggacacagaaacaggaactatatagggatttaaaaccctgctctaccctgctcagtgtgctcttgtgatcagacaggtgcaggcagcaccattctgcagaagtaaatgtgccttgctgagaaattttctaagtgctggtttttctttgtggcaccgagcacttgtctgtaacatttgtgtgtctgtctccttcaatacactgaaaagtccttgatggcaggaactgtatttatcttttatctgtaaacccctgtagagtgcctgtaaatgtgtactgaataaatgaatgccaccaacaaatccagacccaaccctcaatggcacaaatcatatgttataatcaatgcctcccaacaatttgaatctcacagatatactttgcactaaagaagccagatacgaaacaggacattttgtattattccatttgaagttcaataacaggcaaaactaatctttgtgacagaagccagaactaagcggagtagggtagagtgaggggggggtcttatccaggaagggtcacaagagaaccttatggagtgttggaacagtctctatgttgatctgagggtggcagttacacaggtatatacatatctaaaagaataatcaagcagtatacttgagattagtaccatttactgaaatttatcttgtatttcaaaaacccaagttctatatatggccctcatctgcctcaacccccatccaaacatcaatgctcaataaacatttgtgactgaacgcctaaatactttctaaataacaacaatcaactacactattttcatataagggaagaaaaatctagtcaagcaattgcagtcaaagttttgggctggagctaagctaaccaccaccatcacctcacacaaacaagaaacttgcttctgtccagagttgcagtgtgcctacaggtgctgcatgggtagcatttgcccctccctatgactggctggaaacatacccagccccactgttgaggcataggatcccaatggcatttcaagtcactaggagaaaaaagtggaattttacaactgaaggctctatcacatcaaaaatctagacacactggcaataaaatcagaagaaaacctctgcccacctttccaggaattttcacttaatctttctgtgactgttacctgcctgacaaactcctattcatccttcaaatcccaactcagatgttaactcttctgggaagttcttcctaacctcctcaccctccttctatgttccttttactgttctattactttggttcacttcaatttaaatattggtcatgtttatttcccctgagatcacatttgccattctagcacgaagtacatggcagggctctttagaagcatgaaaatgtctgttgaagtgacttgaaacacgactactactggacatgccttacaatttatatgcccaactctagagtcccaaaataagtggtatttcctagataaggcacagtctgtacttatgaagagggagtgaaaaaactataaatattctctaggacagtgttatttttagtattatggtcaccagcctctaagagtgaacttcaaggtagcaacctggagactaaatgactcaaagattatgggatctgccaggaaaggtatgctcctgaagctatggtatagcagatatggtcccagaagcagtgggttcactcgcttcaaggcaggatcttcaatgccctgcatttatataaatgtcagaacaagtaactgtgcaaccccaaacaagttactttacctccctgtgcctcagtttcctcattggtaaaatgaaggtaataacagaacccaaaatttcatgtggtgttaaaggattaaatgagatgatacagtgcctggcatatcgtgagcactcaataaatgtttgctccaattatttcactgctctgggacgggacagggatccctcagttttatttggtcctgtcatattcctgccctacctggcaccggcaccaaatctcttctctgagcctctccaccctggcttccttgcttgcacagctgattaccctcaccacacagggcctccctctggccatgaacacaacccaacaaagcaaagctacactgcattctttagtccctctcctcttccactttcctaatgaaaacttagttgtttcctatttcatttccgtggtgctctatctccttttggttagcagattaatgagagcaaactgatcaaatacccatgtccctacagtcactctctcaaagattctcatgaataaactcagttaaatagagtaacatgaattacaagaatttcaggctctactgtctaatgagacaaagcttcctttccgctaccccctcctctccctctctctttcttcctggcaaagagaagaggggatgctggcaccacaaaccacaaaaagaaggtgcccatttcaccttcctatgaggcaagccccttggttgaccaccagagcagttttacctgtgggcttaccccagccttcatctcacaccaaggagtaaaactgccagtttgctcaagtttaagggtgtttaacgaaacacagtccagtgactgcagtgagcacagtggttcaaggctgggtgctggcctgcctttcttgcctccctggtggacagtctctaatccaactgtgcctctgcactgctcctcgcactgtcatgcttttacaagtcagtggggtcatcaccagcatttctttttacattaaaaaaacccagaattttaaaaggacaattttatagcatgtaaattatatttcagtaaaactttttttggagacagggtctcattctgttgctcaagctgaattgcagtggcatgatcatgggcaatcctcctacctttgcctcctgagtagcaggatctacaggtgcacaccaccacaccgggctaatttttaaaatattttgtagagatagggtctcaatatgctgaccaggctggtctcgaactcctgggctcacgtgatctgcctgcctcatcccctcaaagtgctaggattacaggcatgagccaccgtgcctggccaaaactatttttaaaagattagagaatagaaaatcgagtgcatcacaagtggtgagagtaaatactgaatattaaaatatttgaattatgctgggcatggtggctcatgcctgtaaacccagcactttgagaggccaaggtgggtggatcacttgaggtcaggagtttgagtccagcctggccaacatggtgaaaccctgtctctactaaaaatacaaaaattagctgggtgagtggcaggtgccagcagtcccagctccgtgggaggctgaggctttgaacctgggaggcggaggttgcagtgagccaagatcatgccactgtactccagcctgggcaacagagtgagactccatctcagaaaagaaaagaaaaaaacctttgaattaacaatgcaaacatatacacgtgtgtgtactaggcacaatatagtgtttttatcactatgagttatggttgcaagattacaaaactctagtttcagcagtcaggagctggcctaaggtaaattccttgtgtaaggagagctagcaaaccctttggaatgcttcatttcaaggcattaaggttgagaaacattgaatttaaaaaattcattttgggctgggcacggtggctcacgcctgtaatcccagcactttgggaggccaaggcaggtggattgcctgagctcaggagttggagaccagcttgggcaacatggtgaaaccctgtctctactaaaatacaaaaaaattagctaggcttggcggtgtgcacctgtaatcccagctacttgagaggctgaggcaggagaatcacttgaacccaggggaagcagaggctgcagtgagccgaaatcgtgccactgcactccagcctgggcaaaagagcaagactcagtcccaaaacaaaacaaaacaaaaaagaattcatttcatgaagcctaactcccaagattctacatccagctggaaatgacagggttagcaaggccttaccctgggttcacctattcctgtgtgcatgtgtgcgcatgcgtgtttgtataggaagggtgggggtgggtaggtagggggtgtcagggagaacaggggctgctaaagaatgtgatcctcatgttcctaggcccctggttgaatatcatctcattctccatcccatgcttaacaatccaacgagtgcccaggtttacacaaaaagatgctgagttcagttttgcacttggacaggcaggtggagctgctgagtgtatggctggaaataaaggtttggatcacaggagagggttgggatggaaaaatagattctagagtcatcaaaagttgaaacaacaagaaagaatagcatgcccaggaaggagtataaaactagaaggacataagaccaataagatatgactgaggaatagttaaagattagaggagtccttaatagttttttaaaaattaaaaccccaggaactacataatgactggtcatgaaaatcagtggtcctcaaggaatagcagaagattcctaactcttcaggttgcagatgtcttagagttggctatgaaaatcatttcctagtctcattaatactatcacaatttcttaactaagcatgtgggtgactcaaatggccttaatcctaaaacggaaaataactgtccagataaagcctctccaagtctcaggaagatttgaacaaacacgtctgcactggatgtgaggttccactttagaactctgccacccatcttctctaagaagaccaattccccacctgtggcggggagcacagaaagaggtaagcagggaagaaggctcaggaagctgggccacaccattttccaagggttttcatttccatttctggaatcctcggactaccaggtcaaactaattgatactgaaaggtatgggcacatgactacgtaatacaatgcaggatccttgactggatcctaatgggggacagggagttgggggtggggaggctacaaataacattttcatgggaaaattttaaaaaggactgcatattgggttttacatcaagtttcctgagtgatataattacactgtgattattctatgtaggagaatgcctttttccttaggataaatatgtaaagtatttatgggtgaagcattactgtgtctgtaagtaactctcaaatggtattgtcacaaaaaaagtcatatatagagagacagaaagttataaagcaaatttgtcaaaatgttaataacaggtggttctaggtgaaggggggatgggtgttcatggtattgttctcatacctgtctgtaggtttgatacttttcaagatagaaaggactataaatcctttaagtataaaaaatgtttttaatttctacaggttccaactcccttccattagaatggagaacaaagagttgactcaaaaatgcctcaaaacattctttaatactattcccattcacaaataaaggaatttatttgccaaagagaaactgaatttcaagtgcacaaaccaagtcagcctctatcccacactgagttcctgagttattatataaattaacacaagttagatgttatttttaacataaaccttccatatgttgttggatactttacctgaattctttattttaaagggtgtattagtactaaggagttttacacaaataccaagggttaatggcaaatttacttatttatagctaatacagagagacagcatggataaaccacatgtaagacttattgtgtaagacttattgttttaactagtaaattttaattttaatcagaactattagtaaaattgacaaaatttcatctctatctactttcattcctaaagaagattctatttaataacaaaaaggaaagaagtgaaatgaaaatatccaaagtactcaagtatgaatacttgaccaaatgaaaactgactttaatgcaggcaaacagtttttgagaacctactatgtacaaacctctatgaggaattcaaggtacaaagaatgggccatgcacccatgaggaccacaattttgtaggaaaagacaaacatttagaacactgaaggaaaagaataatggttgactctgtctcaccttgtcccagctgctaatgcctcaattcaaagacttatctcggccgggcgtagtggcttatgcctgtaatcccagcacttcgggaggctgaggcaggcgaatcacgaggtcaggagtttgagaccagcctggccaatatggtgaaaccccgtctctactaaaaatacaaaaaactggccaggtgtggtagctcacgtctgtaatcccagcactttgggaggccaaggcgggcagatcacgaggtcaggagatcaagaccaccctggctaacacggtgaaaccccgtctctactaaaaaacaaaaacaaaattagccaggcgtggtggcgggtgcctgtagttccagctactcaggaggctgaggcgggagaatggcgtgaacccaggaggtggagtttgcagtgagccgagatcgtgccactgcactccagcctgggcgacggagcgagactctgtctcaaaaaaacaaaattagctgggtgtggtggcaggcgcctgtaatctcagctactcaggaggctgaggcaggagaatcacttgaatccaggaggtggaggtcacagtgagcagagatcgcaccactgcacttcagcctgggcaacagagcaagactccatctcaaaaaaaaaaaaaaacttatctcctagtcagtccactgcaatagcctctgaattccttactccatcagacccctctaaaagagtagttctcaaactcagatacgcactggaatcacctgggaaattatcaaaaatccaatatctgggcctctccttcagaaaatctgattttactgtttgtagcctgggtactggtatttttataagctcttcagatgattctaatacacaacaaagtttgagcaccactcaaccaacctctgctgctggagtatagagtacaaaccactttcctgcattaaaacctctgatgactcctcacagccaacacaaacccaaacaactcaccacgatctttaaagcctttctcaacatctccaacctatccctcctccagcccctcacctaccagtactccatggctctccaccatactccagccagaatgaacttatcatttgcctctgagcccccagcaacacatttcttatgcataaaaggctctccaaactcacaaacactaatctcagtctctgattatcaaactccaaatcaattttcaagtacccatttaaaaggtcttcctttcaaaagccttaacctactcccctggcttaacggttgatccttcttcttgagtcttaacaaaatttggacatagctctaatctgacattgatcatgatgcttgtagtggcagtttacctttctgtctcttctaacacaaagtgcattccacaaagggagagatcatgtgcattcccagggcacgtgaatgactgaaacacaatgaattttcaataactgtttgctaaataaatgggcatcacacacttgtggaataaatgaataatataagaaaagacaaaggcaattcaatatgaaatgcccaattagttacagagggaaaatctaacccaagaagtgctgtggggagagagattgcttcaagctgatatggaaagagaaggctccatgaagacacgggtcttgctctcaagtctcatggaaggaaaatatctggatgggccaagagggaggggcagaaaacaataagcatgggaaacagtacaaaagtagaccattccacaggaaaaaaaaaaaaaaaacacctcattaaaaaagctcagtgctttaaagcaaaggtttacttgcttacactatgtaatcattacatatttctttaaaaagaaaaggtatctgcctagaagggacacacatcacttccactgaaatgtcaatatccaaagcaagttacacagccatgcccaatttcaaggtgtgagagagaatgtaaccctactatgtgtccttaaggaagagaaccagaatactggagtcctaatgaccacacgatgaaagagtctagcaccatacctggcacatagtaagcactcagtgattgacagctattattatcatgattactgagggatctggggaaaaaatctatcctaataaccctaagtcatataagcacatgtgaaaaacatcttatgcacattatttaaaataaagcaaaggttaatttacaagcattttaccgtgataaaagggagggatatgccaaaaagtttccattaagcaaaaaaatagtaaacaagatttaccaaaatagtacaacaagcattttaccgcgatatgagagagggatgtgccaaaacgtttctagtaaagaagagctattaaaatacccattcttactaatttaagacatgtaatatttcactgatagtatctttattattttagagaacattaagaaaattatggagcctttcacatgttcactcctaatctcagagcacagctatcccatatttcccccatgaatttttaagggaaattctcctacgtgggttttcaggaccctaatccttggaggttaagggaaaagtcctatacagcaaaatgaaaattgaattctaatcaaggcttgaccacagatcagctctgtgacctcacaaatatttacatgactaggaccccatcccattatgaataatgaaaatggatagatgtcttcagaagtaccttctaactctactcttctgcaatcccgacaagatagaaagtagctttggtttcagagaatctagtaatgatggtgacctgtgtaagacccgataacacttaaatctgccacaaccacactcataagggcaacaacaaaacttagttcaagagtaaatatgcaacacagtcaagaacacacagggagagctctgctacatgaaatgctgcagacacaaagtgcagataaaaatggacagagtgtggttattttgtgtgtagcttatgaaatcacaatattttagtaacatctcatacagcattccaaggacaagtggcagtgatgagaacaaacctgaagtaaggaacctccaaaccttttaagcttaggatctgtccaactatcagatctaaatttcagcacactgggctttccacttctttaaaaccctacagcaagaattcaaatacatgcccagagagctgggtgcagtggcatgtctgtagtcccagctactcaggaggctgaggcaggaggatcatttgagcccatgagtctagcctgggcaacgtaagagacccagtttctataaaacaaaaacaaaaacaaaatacatgcccagagatctagaacttgacatccttagaagaaagtcagacaaaaaagccaaagcagcaagttacaaaatgttgtgccccataatcagtgacacttgtgtcaaacagaagcacctgcccagacaacctaccgccactcactgctttgtgagtatacaaccacccttacaacagaattaatgagaaaacagtgctgatctgtaatgaacaccaaggagagactatatagcattaactcatgccataaacaaaacagacactgctgcattataaattttgctacactggcagccctatccgtgatttttaaggaaccttccaattttaatgttctgtgagtctataaaccacataggacacccgttactgtctctcatgcttcaagagtcactgcctaaatgactaacaatttcctgcttgaaaatctaaaacctggtaaatatatctaataaaactgctgtatgattagactcactttgttacgactggacagtatttttaaagctacaactctgcatgtggatctgtgtttcctttttttttcttttttctttttttttttttttttttgagatggagtctcactctgccaccaaggctggagggcagtggcacgaccttggctcgctgcaacctccgcctcccgggtttaagcgagtctcctgcctcagcctcccaagtagctgggattacaggcatctgccaccatgcttggctaatttttgtatttttagtagagtcaggatttcaccatgttggccaggctggtctcgaactcctgacatcaagtgatctgcccacctcacctcccaaagtgttgggattacaggcataagccattggtgcccggcctatgtttatttctacagtaatttcctccttcttgtcaatcacaacataattttcaattttgcaatagattttgatgaatatactacaatcaatcttatcattgatttttaggagtttaaaatttgtattccccatttacaagtagatggggagaggagacggagaatatgcaaccccgaatgaaccaaagaaattgcttctattaacaaatcaatttttaaacatattggaaagggaggagaggataagactcagtctttcaagggaggcttggtaaatgttattttaaaaaaacaagattcccttcataaagttaattgataggccgggtgcggtagctcacgcccgtaatcccagcactttgagaggccgaggcgggcggaatacaaggtcaggagatcgagaccatcctggctaacatggtgaaaccccgtctctactaaaaatacaaaaaattagccgggtgtggttgcaggcacctgtagtcccagctactccggaggctgaggcagaatggcctgaacccaggaggcggagcttgcagtgagctgagatcgcgccactgcactccagcctgggtgacagagtgagactccgtctcaaaaaataaataaataaataaataaataaataaataaataaagttaattgatagataaacctgaaatactttgtatggtaaaaatatccattactggtctaaagtaatgggaaaccctatagtcagtagtttgtattgagaacaggagaactacagtgttatacttaaaagctgcctatcttcaatcttagtatgaaagaaaaaagcttcaaaagtcatgttgaaagacatcatgcatgttagtaatagacaggaagggtcataagtccccgctggaacagctgccttgctttttgtaaagccttacaagacacatctaaatttattctctgatcttactattttctgaacattcaaatcaactttcagataaaaataaagaggcaaatataaatagataaataactatcaatttttattatacggcttgcttagactcattttaggttaaaggacaatcttgtttcctattatattttccttcacagacacagaaaaaaatccacctttgctccaaaaagggtagaaatgctaaagggtctagagctgtgctgtctaatactggtacgactggccatgtatggctatttaaattgaagctaatattaaataaaatttaaaattctcatcctcggtcatactagccacatcttaagggcttgaaaaccatcagtggctagtagttcccgtgcagatattggacacctccatcataacaggaggttctactgaacagtgctgatctagaacaatgtttctcaaattttgatgtgcacaaaatcatcagcatagcttgttaaaacacagactcctgggaaccctaggtggtctatttcagtaggtctggaatggggcccaaaaacttgcatttctttttttttttaagacagagtctcactctgtcacccaggctggagtgcgatggcgtgatctcagttcactggatctcagttcactgcaacctccgcctccccggttcaagcgattctcctgcctcagcctctggtgtagctgggattacaagcacatgccgccatgcttggctaatttttgtatttttagtagagacagggtttcacaatgctggccaagctggtcttgaattcctgacctcaggtgatcgacctgcctcggcctcccaaagtgctgggattacaggtgtgagccaccgcacctggcaaaacttgcatttctaacatgctccaaagtaatgctgaagtttcccaacactttgattagtgaagaagtagtttttggttttgctctttcccaatctatggccaagactttcataaaacaccagaaaaatgaatttccaggaaaaaataaacaaaaaaggactacaattataaactgtttttataattagattcaacaaaccatttttctaaccatctgctataaaagcatctacatgcttcttttcaagttctgtactcaccttgtcagacaggtaagcagaccacagatctgcaggaatctgtagactactttcagtagcctgattcacaagagcttatttttttacatttttacacttatctttctggagctggtcattaatgacctctttcatatcctctatcatttcctcaatgcatttttacaactcaaggcaaaactgttaattccattaagcaaaatacccctaaatcccttaagtgatattataccaggtttgcttaaagaagcaatctaatggtgtcatcacttacaatgtgatctgattctatcacaggatcaacaataatgatggcttaactttttcatgcaagcccatagttgaatttagactgccagcagtgcaagaatttctaagccaaaatacacaatgagctataataaagtctctgtgttaaattatgtaaaattctttccgtaaataaaatctatgatctagacttagcttaccagacataatccttcaaagtatttcttagaatactgatagtttttcttggacccaaagtagatagagtccagatatatttctttactcatatacacttaaggaaggaacaaaccaaataatcaagtcaatgcccttcgcaatctgcctaaagcttaggtattttccctaatctaattattattatctattattaaacaaaataaactgatttttcttctattcaacttctggtctggcccaacaaaaaaaatctccagaataactttaagtttgaccacctcctagagttactctcagaattttttcattactctaatattgttttggcaatttgcttgacttattaagtaaataataaggctctgagaactttaatataaaatcctttttatataataacacctggttttatatgtatgttctctgtaaaatttttagcagtctaaaaataagcttttatgttcaactacacattattttaaggaagaactccactaaaaattagcactaatggaagttgcaaagcatttcataaaagtctggggaatataaaaaaatggagggcttcttttaattcttcttcttcaatgtaagaaagaaaaacccttttcctcctaacatattgaatgaagcaatagcagaattagtaagaagcagtattcaaagcaagaaaatgtcaggcacatttgccatggcctcccctctagtcccatctgcagaggcagatgtgtgaaaaagagaggctgaggaccctctaagagcctccatgtctcccactccaacctttaactctatcaggctgcaagggcaagggcaacgaatggcttccatgtgatcatgtgatcacagcgagggaagaatttgggggataaccccagggaatgcctgaatgctgccagagggatgcagttcttccccaagcccaggccaagtgatcaaggctgagactgctaaaggacaaaaaaggtccaaagaagtcagcatccaggcagaagattttgttcatgcaaagcagttgttctagaatgacctaaattaatgatccttagtatgttttgtatgctggtggaaaggtatggcgataggggtatgagaggcacagatccgtttgagaatcataaaaaacaatggattgtccgcctataaaatacgcagatgcaaacaaaaatttgcatactattttggggcgttcacagaccagccaaagactccctaggggtccacgaactgcaggataaaaagcttaaacctttaggtaggaagtaaagatgtctgttactacagtagctggaacttttaacctgaagccaggcttttacataaaaacaatcttagagtataaaaaaaaaaaaaatctaaaaccaaaataccttggtcacatagtatataagaaaatccaaaatatattaaaaatttaactacttgataaagaataacatatttgatccataaaatgcgatcagcgactatcccttataagtatcctcaataaaggggtaaaaaaatggaaatctccctttacttatttagaaaattcaaatatgcatccatcactttctacttatgtttggattcctgtcctggttatcttacaattctacttcccagcatcctgaaattttcaaatactgtcttagtatattaaactcttttgaaatagataacaaaagcaccatgggagtccgttgaaaacttaggtttgttccttgctaaaatttctaagtccttcattatgactataaagaaaaaaggttcatcaattcaaaaaaaaatcctgattcttcaaaataggagctatttaagttacatcatatacaccccattacaaattctaaaggttgcaaaacagaacagtgatggcaaacaacataatgaataaatgtaagaggatgcacagaatcactatttactgactataaaaaccaacaaatacaggtactacaggcaaaaacaaacatttttctttggattttatgcagatgatttagttcagaaacagggacaagcatggatattttaaaataactccattttactaccttcaggacttttatggaagtaacagaatttctcatgagggtatcaacgcctccacaacatgaaccaaagaaaagaacattttggcaaaggaaaaagtgactgcgttctccctctgcacttcatggttattactgtaccagggtacacctgaactcctaagtgccccaggaagaccactcctactccatggagacaaaagtggggaaaagggtgtcctcactgtattccaacactcctcttcagtgacaaattcctgaaacggaaaagtaaaaatggatgcacgtgtagaacttagggaaggtgtgttagctaattaacctaacaccataccactaaaatacaacagtacgcttgagcttttaaaaaaaatctttagagagaactactggtgaaaaggacatgtattggatacagatgatcagggtcaaattctggctctatcactgactagctttatggcctttaataaattacttcatttctctgagctgcagcccagtctcacgaagtggctatgaaaacaaagatatttttcccaactctgtagccccagtatctggctgagtactggacaaacaccaggtattcaatcaatgctagttctttttgctccactcacaagcatgtcacattccattgcaaaaaaaaaaaaaaaagttctctagggaagaggtatctcagctctggctatcattttatgtatttcaaagagttttcaatataataacctggtacaggagaatgcaggcaatcctatggaattcactccacctttcacttgaattaaactaaagctctgcatgagcaatgaagtataagagaatcattaaatatgtattaaaaacaaaactatttcaagccttcttataccaggcggggaaaggggaaggagggaagtagagtgcagcctcctcagttgatatgtatatactgtcattgtcctataccaaagatatttctgcaggtagaatctttgaatccttaaacttgttcaaagagattcagaacatgggtggtccatgagtgatctcatttagtaattaccaattaaagtctttccatgaaaaacataggcacctacagggagaatcaagcctgatgttgtggaacctcatggtataacacaggaagacataaccacaaacgctgcttcgggcaaagccatacttccaagaaaaccaaaacatttcttcaaaacttttataaaccaaggagctctccaacacatagtagcccaagggccgcctgttgtttctgataggttttctgcaatttcacagcaaaatcacaaataagatgtggcttctaatgagatatgattctgcttcaggttttctttggtatttgaaatatacaaaaagtaaatcaataaatacaaaaacataactgccaaaggttcttccagaaatgcagcagttagtcgtatttctcccacttcacttctaacttgtctttcaatttttgtgtggtttgccttaactaatacactgatgagttcagagaacttccccaactacatgaataataaattataaaaattataaagatatagaatatttaaaagttgtaaaaatgatcatattgaaagagtttgcagtgctattaaatgtaacagaagagctaaatgtgaaaagcaaagaaatagctgcagaataaaaaacgtgactccaggaagactgtgataccacactgaagcacaactcaatttcgcaacagatctagatttacttcgcccatggccagactacaccaagaacagtactatggtctggttactattagagagactccaaagcaaacaaaacggtggggaaagatgtgtgcaggatagcttttagtcacccactaatcaagaaaaatgtttaaattcaaaagaacttataattcatctatgaaatctgccctggaacaaaaataactccaaaattaataatcttaccactccgcattttcccaaggcctttggttataaagatgcattgcttatatgaaaccacctgctctgcttggcataaatcatgttacttgaggattcatgcctaatcattttatcaaacacagatctcaaatcttctttctgttgccagagagccataaagttcacaaaaactctctctctgaggttgccaacctgattttccaatttggctgacagtcaaactcgactgtgccatgaaatcaatgggacagacccccaataagttacacagctcacatcagcctagggagcaaaaccgagtggtctgccccggtgttttttccccaaacgccacaaacatatttccacaaagtacatcaaaattgggggcccattgggatggtactcttacataccatctgggaaacaataatcaaatttcaggcaatatttcagacatcctgaaaactgtaaatatttaaaatgtgtattttctgtgttcgtggatctgccagcagaaacgaggagttttcagggggtgggaaataaggcacacacacagccccagagagatgctcagagatgccaaggattcaccagaaaccttggccagattactaatggtccataaaccctaatttggagaacagggtcctacgagctcaaaattgaattatactgccttattagatcccacacgactgaaaccacagtcacattagtcataactggaactaggaatactttatgtacacaaatataaagtgcctgcttatgcatttttaattgtatcaaataaaactgaagctgcaaacaaactcaaatttcaattatctcactagtgaggggatttcctaataacgcctttaaaaaaaaccaagtagctgccaaccctctgcacatccgataggcatgtccctggaaatctgggcgcaacggactccgttacttctcaacagcgaggaaaataaataccttgaagaggacagatagatctttttttaaagctccaacatgcgatctaataatgcacaaaacttggcagcggggttgcaggacccctcctgggctccaattttcggggcgagtgcgcgctagtgcgtaagaagggggcggagggggtgcgcgatccgaggccgcgcaggggcccccgccccctcccggaacagcagcctggcaccagcccaccctcctccacccctgcaaacagacgcaggacgcgaatagagcaacttctccgcgggggcggcggcgggaatagcggtcacccccgccccgccccagcgcggctgggcccgggggtcccaccgcgcccgccccggggggggcctcggcacgccccgcccccgcccgccaggcccgcggccggggtctgcccggacccccgcccctgcgcgcggcccgcagcggcgcactcccaaggacggccgcccggcccgagcgaaagcgggagcgggagcagtagcctggcgtggcagaggccgcccctctccccaggccgcaggccgccgcctgccctccgccaggccgcccgcccgccggccccgctcggaccccagcccggccgggcctggacgccgccgcagcccctcatcccggctccattcataggggcaccctaacccggccggcggggcggggccggggacccgcggacaaggccggtccgccgaggccagggaggaaaataaaaagttaagagaagaacttacctaaaatggctcctgcagcagccaaaatacaaacagctattatttggtgaagtttagctcagacaccctgcaaggacaccctaacccatctcgggcccgccttccctgtcgcgccattgggcttcgccggtccaaaacacagacccattggtcatcccggctgccgctcagacagaagcccatttcaagcttgcttgcaggggcgagtgatgggctcgctccattgtgctcgtatttgcatggatgtgatcgcggccttgattggccggcgctgagaccgccccgccccctgcctcgtgccccccgccttggagacgccgctgcgctcggccccgcccccccgggactagcggcagggccacgggggcggggcggggccggggtcccgcgggccgagggggcggggcggggtcctgcacgctgcagatcgcaggcagggggcggggacctggcgcgctcgggcgccggcgggggttcagcgcccaggtggaggtctctcaggtagctggctagtgatctggaagacccggggctggcgtctccgggggtgggggaggatgtggctggggtcccgcgacacaggggttccgcaggggccgaggccacgcgggcagatgcaaggagaagcgagggacccgcaggtcaggaaaagaagatcctgagtggccaagcgaacggagcagcctccacccgcgtcttctgccgctcagcccggctccctggtactcctggctcccaacgggcttcttcccaaggcccagcgcacccgggagttttccagccccggggaccctgcagcgccttggatagatctccgtgaaatcaggtgtcgagctatggtgcatttattttcgggcctgtcgcccctaccatccttgtagcatcctcaaggacagggcccagtgtttggcagagattcaactaattgttacactctcgaattcattcgttagcaggtaatctttgagtgcccactaaattccagacattgatataaaacgggatattgcggtcaacaagacaaagcccttgctttcatggaataggcgaaagactaaatacaaggggtaggtagtgataaatgctgtaaagaaaatagatggaagaagaagggaaattagaccagggtttaggaattaggaaattcctaaattatgaaaggaggtatggagagtttgccctgcctggctgaatactctgtatggcgtctcattactgccccctcccaccctaaccttggcagtcaccagccctcctcgcgccctgcttgcccatcgtgttttctaagcacccactaaaaaactgattggattctgactgtagaggctcattctacctcaaagcagaaatgatctgagtctgatgattctaagagcagtttgtgggatacatttaggataagcacattttgactgtgtcaggggccatgataatgatttagcagaggcttactaactccagagagagaatatttttagcttctttgaaatcccagttttctgatggctttcagcctgtggccctaactctcttctgagtaacactcttcacttcttggcagacacaagagatttctccagcttgaaaacagaggcagcagccccctgctgcctatctctctcatctgtgtgcatttctgtcatttgactcaaggctggccaagatgtcttatggtctttctttcttgtctttcttcctcccttaaacagatatttattaggcaccaactatgttccaggtattgttctagacacaaggaatgcagcattaaacaagacaaataatatctttgccctcaaggagcttacaatccagttgagggtgagatagagagttacgcatagatcctgaggatctccaattttgccaagctgctggtgagtgagtatactgagggctactcgcctgctgctgcctcttggggacagcatgcttgaccttctgaaccagctgcttcaggagctgaagctgaagctgaggtaggaccaggcagctggtagccacaacctctccagctcaaacaccagaatcacaggttccaaagctctcaacagtgcccatgggagtcttggctctcatgtcttgaaagagtttgggagcagagttgttgttttttttgttttgtttttgagacggagtctcgctctgtcgcccaggctggagtgcagtggtgcgatctcggctcactgcaagctctgccttctcggttcatgccattctcccacctcagcctcccaagtagctgggactacaggcgcccgccaccacgcctggctaattttgttttatttttaatagagacggggtttcaccatgttagccaggatggtctcgatctcctgacctcgtgatccgcccgcctcggcctcccaaagtgctgggattacaggcatgagccaccacgcctggccagggagcagagttttatcagacagttttggtgggtcctatgtgggagtcacatggccctccctttgcataataaagtctcttgcctacaaaaattgaaataacataaatgaggtgggactctagacagagagagcagtatgtatataccaatgcaagaggcagcctggggaggtgtgagagcaagaggaagatggaaggtggacttgtcagtaattgctgttcttaaacattgagaaaagtcagtagcacataagaagttagatatacacagagacacaatattaagtcaccaaaaaagaaatcaatagaagtatatgactgattcacaaataagtgggacaggtacaagcaaaggaatggtctggggactacatttaggagaagtggcaggcttgaccttatccagtgagaatcaggtctgcagaactgagaggagttagtggagtctgacccaaggtacttcaccaggaaccagtggggaggaactgaaggggaaagggaaacagagacagctaagttgcttttagctatacccattcatggcagtgtcttcgcctgcgtctccagaaacagagcctgattctacagggcaggagtaaagcaaaaggagtaaagtggaggcgaaggaagagccagtaccaggatggttattaatctggcctccactaagtatggctgattgcttctgctcaagggattatcctctgagaaatataaaatgagtctcagaatagcctatgggagggggaagggaaggaaatttatccatcagctcatctcattggataaagactcataccagttgttcatgcataggtgccaagtgggcttctgcagtgtcccaaaactcagtgtcaacagggaacctagcaagaggcacatggcagggccacaaggcaaagtgctgtcagggtgcagctgtgtgaagtcagatggtgcccacgcagagcttgatgccacagcagctgctggaatgaaagatgattgatgctacaagggtgatgccagtgatgcaaaaatttttgtaccatatagtgtgccccatttccaaagggccccagaaaagcaatccttgagagctctgaagggagccacagaagggcttccagcagttctggaactttcttatagtaactccacaaaagaagagttgcatcccacccgaatctgttctctcttgctttcatgcctgtgttcacttgtctgtttcctctattagaccatgagcttctttattgttcttgttaatatatctgtgacaggaaaaacaactcttttcaccagcccatttcattttcctcctaggctcataaaaaaattacatttctcagtaatcaggtaggcccatgtgactgagctctgggtaatggaatctggacagaagtggtaaatatatcccatttctggacatcccccaaaaactcccgtgagatctttcaaacttctcctttcctcattcctggccagatgcaaaaatattgagtggaggactcagaggccccagaaaatggcagtggtggctcactgcatggactagaacgtctgtgctcacttgcactggattgtgttgtaagcaagagataaaatgtcacagtgtcaagtcactgaaatgtgaaggttgtctgttacctgtctgatacagtacttgtctaacttcatgtgattccgtgtcactccagggcagggactgtgcttgtaactcaagcacaattgcaatgcgtggcacatagtaggcatttcttgaaatatggacaagagtgaatgagctgatacttgagcctggtcttaaagatcagaggtagaatgccaagcaaggtggcaagtggaaagtgttccatgaaggaggtgtagcatgtgtagaggtagagaaactagggaaaatagagtctgttctcagcccagcagaagggtcatggatatggttagggtgaggctagagagaaggcaagggtcagatcacaaaaagtcttgtatgttacatgaaggagtttgaaatttatcctacaggaatcattcaaggatttaaaacaagaatgtgatgtcatcaagtttatctttaacaaatatctctctagctacctggaaaaggatggattagaaagggagagtcagaaatacaaaaaatttttaaagcagcatttcattcttcccaagttatttgtcccataagatgttccactaaaaagaggttttggggacaagttagtttgggaagttgagtatactgtagcccctcctggaggttcttggagatttctgttcacatattaaaaaccctgagaggtcctacattaatgaaatctgttaaagtttaatgtaatagttctcaaaattatttgaccacagaacccttttttcattgaacacctattaaaactggtatcacggccaggcgcggtggctcatgcctgtaatcccagcactttgggaggccgaggtgggtggatcatgaggtaaggagatcgagaccatcctggctaacatggtgaaaccctgtctctactaaaaatacaaaaaattagccgggcatggtggtgggcgcctgtagtcccagctacttgggaggttgaggcaggagaatggcgtgaacctgggaaagggagcttgcagtgagccgagattgcaccactgcactccagtctgggcgacagagtgagactccatctcaaaaaaacaaacaaacaaaacaaaaaacaaaaaacaacaaaaaaactggtatcacttaggactcaatttggctgcataaatatgagaaaatgatataataagattaaagtttatttctgtcttaaataaaagaaatttgggaagcaggccgtccaggggtggcatggcagctgtccggtaccttcaggaatccaggcttcaatgtttttgctccattatccttagctttcattcccaaggtcacttcatggtccaagatggctgctggagcaccagtctacatgtccttggaaggaaaaaggaaaggcaaagtggaaaaagtggagttgagtcccttaaacaaccttcctggaaatactacacattttacttttgtctcattgtccagaacttggtcacatgaccatgccaagctgcaaaggaggctaggaaatctggtcttttattttgcttttctatgtgccaagttaaaaattgggtctgtcactaaagagttgagagactcaactagcagtttctggcataatgccccacagaaataatgttccacagaacctaaattgggataaaatgactaagtaaggagattgattttttaaacatttttagcagctttattgtggtataattcacataccatacaatttgcttactgcaagtatacagtttgacgatgtttagtaaatttatacagttgtgcaaccatcaccacaatccagttttagaatatttctgtcaccctcagaagttccttgttccctcttgctgtcaatctccactcccacccccaggcctgggaaaccattgatctgctttcttctttggagttctgcctttttgagaaatttcgtataaacagaatagtacaatatgtagtcttctgtgtctggcttatttaatgtaataattgtgtggttcattgtgttgtagagtgttttgtcagtttgtactttttaaaattgcttgaatggcattccattgtctgcatatgccactccattgtctgcatatgccaccttttatttatcacttactaaatgatggacattcggattgtttccacattgggactattatgaataatgctgctataaaccttcaagtagaagtccttgtgtggacatatgttgtcatttctcttgggtagatgcctaaggagactggtgtttaaaactgaattcgttcactgaaaagacatttattgagtgcctattactgacaagtattgtgctagatgccaaggatacagtagtgaataaaatttgacacaaactcagccctcatggagcttgcagtctatagaagagaaaggcattagtccagtagtcatgcgaacaaacgtaacatcacagcagtggtaagtgtgtgctataaaggaggggtataagatgctgtgagagattatgctagaaggatctgcctttgtcaaggaggtcaggaaagctgcccttgagctgagttctgaagtgtgtgagaatgtagtcactctgatttctgtctttcaaagtaatatcttaagaagccatatacttatttccaataatgctgcccttgcaaacatgtctgagccagtttatagacacactggtcttgggcctatttgtgcttagataaagtctctgtgttttaatctctcagagtttttgaaaactgtgaagcaagcacaacgcactgtcagtaaaggtaccttttcagtcatctctctctctctctttttttttttcttcagagacaggatcttgctgtgttgcccaggccggtctcaaactcctagactcaagcaatccttctgccttggcctccccacacactgggattacaggcatgagtcactgctcccggcccatctcttatattattttctgtatgtttgaaatatttcatgattaaacatcttaaaaatatcctttttagttcccttgagaattgtacctgccaagcagcccagcctgtcttgtcagaccctgaccttgttctctctctgtgggaagaggagacatgatcagaaggtgatttctggaacctggaactgaggggatgatgctaatagccagtattctggaactacactggtccaatccctgtatctctactgtaggggtgaatctgccacaaggcatcctcctgccagaagctccattctccagcacaaagctggataagactagttaagcccacaggctttgaagccctacagatgtggttcaaatctcagctctaccactagtgtccttaagaaagtcacttaacaggccaggcatggtggctcatgcctgtaatcacagcactttaggaggctgaggtgggtggaacacccgaggtcaggagtttgagaccagcctggccaacatggtgaaaccctgtctctactaaaaatggaaaaattagctgggcttggtggcacacaccactgtaatcccagctactcaggaggctgaggcaggagaattgcttgaacctgcgagatggaggttgcagtgagccaagattgtgccactgcatgccaacctgggtgacagagtgagactccatctcaaaaaaaagaaaaaaaaagaaagtcacttaacttacagtttcatgattccaataatagggttgttgtgtggattaaatgattcatgcaaagtgctttgcacatggcaactgctcaacaaattggttattaatatataattatcgcagcctttcctctgcctcccatttccccgtgttctgtatagactttccccctttgtcgacctgcaggttttgaaacatattaattccattgatttaactgaagtcaatctctgttcttgtgtttggcttggggaaccttctgtcttttggagtgccttctactgatatatggcctctacccctcatgtattaatctcactgatttaactcttacagtgccacagagctctcactctcacccatgtatagcactaccgctattttgattttttaaatccaaggttatatataaaaatgactgtggtccctttcagttactatgatttatggaaaatcacacctcaaatgttcttgggcaggatttttcaaaaacgctggtcacgctaccctgaaacagcttcgtaaatccttcattcttgctcagcagtgtactttcctgcaatgaccattagacagtttcagccataaaaacttgcttaaggccgggcgctgtggctcatgcctgtaatcccagcactttgggaggccaaggcgggtggatcacttgaggtcaggagttcgagaccagcctggccaacatggtgaaaccctgtctctactaaaaatacaaaaattagctgggcatggtggtgtgcgcctgtaaccccagctgcttgggaggctgaggcaggagaatcacctaaacctgggaggcggaggttgcagtgagctgagatagcaccattgcactccaacctgggcaatagagcaacgctctgtctccaaaaacaaacaaacaaacaaacaaaaaaaaaaaaaaacaaaaaaaaccacagcaacaaaaaagttcttaagctttttactaagcctcaagttgctgtagaatccttttctttatgtgtgcaattctaccatcaacattactgaccaatttggtgaggctaccgtctgaaaactggtaataaaaataagcaacacagttttacatactagaaacaaaaaactatagttttaaaaaattaattagtttccatgtttttgctgaggtgaagcatggtaactgtccttccagttggcccccagtgatactcacttgctgtgattcaaacccttatactgccctctcctgtactgaatagacctgatttatgtatgtaaccagtaggatattgcagaagtgacagagtgtaacttccaatgctagtcataaatggcattgcagcatctgtcttgctgttttgggtaatttgcaatgggaagagtccattgtcatgacatgaggacattcagtcagccttatggaaaaagtctttgtggcaagaactcaaggcctcttgtcaggaaccatgtgaatgggccatcttggaagtagatcctccatgcctagtcaagccttcagatgagactgcatccatccccagccaacattttgactgcaacctcatgaaaacctaagtcactctcaaatttctgacctatgaaaactatgtgagataataaatgtttattgttgtttttaagccaccaagctttggagataatttgtaatgcagcaatagataacagtatttccttgggtgatacaactgacagccatcattaagttactgtatatttaaaatgtgctttgtataaatttgccccacattttaagtgttttcttaacatatgatctacatccagatattttaggttattctatgactcatttcagtcccattcagcaaacatgctgtattagtctgttctcacactgctataaagaactacctgagactgggtaatttagcaagaaaagaggtttaattgactcacattactgcaggctggacaggaagcatgattggggaggcctcaggaaacttacaatcatggtggacgggcaaaggagaaacaagcacatattcacgtggcggcaggagagagagagagaaagagagagaaagagaaaggggaagtgctacacacttttaaacaaccagatctcatgggaactcattcactatcatgagaacaaaaaggaggaaatctgcccccatgagtcaatcacctcccaccaggtccttcccctaacattgggaattacaattcaacatgagatttggttgaggacacagagccaaaccgtatcacttgcattgcctacttgtatcaaagcctgttcgtaacagaaaactccagatcaaccatcagcaatttgaacgaaactgatggcagtaagttgtttttctccatccaattccatttattgtgaatgattcttatgctttcatgattgtagttaaatctctggatgccaggaagtccagctcctaccacttcttttgcttctttttggaatatatgccagaagggaataaagttgaagagaatgatgcccccatgttactaaaacatgcactgttacattgacagttcataatagctaattttattgcataattaatatgaactaagcactgcttttaaaatttttaaaaataatttcaatttttattttagattcagtgggtacatgtgcaggtttgttacatgtgaatattgtgtgatgctgaggtttggggtgtgaatgatcccgtcacccaggtggtaagtatagcacacaataggagttttttcagtccttccctccttcctccctcccaccactagtagtccccagtgtctattgttcccatctttatgtccatttgtacccaatgcttagctcccacttataagtgagaacatttggtatttggttttctgttcctacattagttagcttaggataatgacctccaattacatccatgttgctgcaaaggacatgattttattctttgttatggctagatagtattctatggtgtatatgtaccacatttcattatccaatccaccatggatggccatctaggttattctatgtctttgctcttgtgaatagtgcagtgacgaatgtatgagtgcacatgtctttttggtaggatgacttattttttggggggtatacacccagtagtagaattgctggattgaatggtagttttgagttatttgagaaatctctaaactgctttccacagtggctagactaatttacattcccaccaacagtgtataggtattcccttttctctgaagcctcgccagcatctattattttctgactttctaataatagccattctaagtggtgtaagatggtatttcattgtggttttgatttgtgtcttgatgattagtgatgtcgaggtttttttttaatatatgtttgttggccactcatatttcttcttttgagaaatctttgttcatgttctttgcctactttctttattttttggaggcaggatttcattcttttgcctaggctggagtgcagtggtgcgatcatggctcactgcagcctcaacctcctgggctcaagcaatcttacattagcctcccgagtaggtaggactacaggcatatgccaccacattgtagttttttgtagagatggggtttcacaatgttgcctaggctggtctcaaacttctgggcttaagtgatctgcctgccttggtctcccaaagtgctgggattataggcctgagccactgtgcctggccctttgcctactttttaatggggttgtttgtttttgctttcttgatttgtctaagttccttacagattctggatattagacctgttttagatgcatagtttgcaaatattttctcccattctgtaggttgtctgtttactttgttgaaagtttgttttgctgtgtgaaagctgtttagtttaattaggtcccacttgtcaatttttgtttttgttgtgattgcttttgaggacctaatcataaattattttccaaggccaatgtccagaatggtatgtcctaggtattcttctaggatttacttatagtttgaggttttacatttaaatatttaatctatcttgagttaatttttgtatatggttaaaaagtatgggtccagtttcattcttctgctcatggctagccagctatcccagcaccatttattgaataggaagtcttttcctcattgcttatgtttgtcagctttgtcaaagatcagatggctgtagctgtgtggctttaattctgggttctctattctgttctgttgggctgtgtgtctgtttttgtaccagtaccatgttgttttggttactgtagccttatggtatagcttaatattgggtaatgtgatgcctctggctttgttccaagcactgttttaaatgctttacatgtataaaatatttaattcttacaaagaaaaagttattaccctcattttacaaatagtaaaactgaggcacatcactggaaggaaggctgcagagtctagagctatcaccatctctgtctgtcagccacaagcccaggtgccaaagtgcagcagtagctgccacacaaatagcagttcagtccagtgtcctagctttcctaggctcccgctctaggtatcacaagcaaaaacaaggctaggatttgacagaaggaaaagtgaaaagaaagcaccaacaaagcatacaaacaaaaacatttacagaacacagatgctgtgatggttaatgttatatgtcaacttgactgggctaagggacgcacagatagctggagaaacatttctgggtgtgtctctgaggatgttcccaggataaattagcatctgaatcagtagacttaataaagaagattgccctcaccaatgttagtgggcatcgtctgttgagggcccaaagagaataaaaatatggaagaagagtaaattccccctctccttgaactgggacattggagttcctggttctcaggctttggattctgaaaactacacctgcactcccctcacctctactctctgttctcaggccttcaagcttgaactaggaattatatcataagatctcctggttctcaggcctttggactcatactgaatcaaacctctggatttcctggttctacagcttgcagatggcagatagtggaaatattcagcctccataatcatgtgagccaattcccataataaatcttcttgtgtgtgtatgtgtgtgtgtgtgcatgtgtgcatgcttgtgtgtgtccttttggttctattctctggagaaccctaattcagatgtcttatagtaattttaaaagatgacgccaggcgtggtggctcacgcctataatcccagcactttgggaggccgaggtgggcggatcacctggggtcaggagtttgagaccagcccggccaacatgccaaaaccccgtctctactaaaaatacaaaatttagcctgatgtggtggcgggcgcctgtaattccagctactcaggaggctgaggcaggagaattgcttgaacccgggaggcagaggttgcagtgagccgagattgtgccagtgcaccccagcctgggcgacaagagtgaaaatccgtctcaaaaaaaaaaaaaaaaaaaaagaacaggaccgggcaggcacgatggctcacacctgtaatcccagcattttgggaggtggaggtgggtggatcacctgaggtcaggagttcgagaccagcctggccaacatggtgaaaccccatctctactaaaaatacaaaaaaattagccaggcatggtggcaggtgcctgtaatcccagctactcaggaggctgaggcaggagaatcgtttgaacctgggaggtggaggttgcggtgagccaagatcgcgtcaatgcacttcaacctgggtgacagagtgagactccgtgtcaaaaaaaaaaaaaaaaaaaaaaggatgaacagcaacagcttagctttactggcttaatggttctccaagtgtggttcctggaccagcagcagcatctaggaacttggtaaaaatccaaattcttggactcaacccaaaccaactggatcagaaagtttgggggtggggctagaagcctgtgcttaaatgcatgctgaagtctgagctccaccgacgtaggggacccagctgtggctaaatctgggctgtgtgactcagagcccatgacaactctggggagtcattacagcgccaattttggagtccaacagcaacaatgaaagatattctagccaaaaagaaacatgactgtcattccttcataggaatggaataaagcagggatcttcaacatgcctttgatgccccctgtcaaacacagattcctgggctaggatgaagggtatccacctaacttaacttgaaaatatggattaagtgccaactgtagtggatgaaagcatgttgagaggaggctgaaagaggccaggtcactttagagcaaattaggtagtataatattcactagctgctataataaatatacacacaaaagaataatggctccaacaaaaagaagtttattgcttgcttatatagtacttcaaggaaagtattttcctttctttctttctttctttctttctttctttctttctttctttctttctttctttctttctttcttttctttctttctttctttctttcttttcttttctttctttctttctttctttctctctttctctccctcccttccttcctttctttctttcttttttttttttgagacagaatctcactctgtcacccaggctggagtgcagtggcgcgatcttggctcactgcaacctctgcctccccggctcaagcgattctcctgcctcagcctcctgagtagctgcgattacaggcacatgccaccacgcccagctaattttcgtacttttagtagagatggggtttcgccgtgttggccaggctggtctcaaactcctgacctcagatgatctgcccgccttggcctcctgaagtgcggggattacaggggtgagccaccatgcccagtctaaaggaaagtatttctggttgacaagtcacaatcctctacctagtgattcagggggattccttctacgccataactacatcatcccctagggttttgtcatcttctgcatccaactagcaagaagagattgtggttaggacacacccccttttaaaaagcctagaaatcacacatatcacttctgcttatgtgtcattggctagaactcagttacatggccacaccaaaccacaagagaagctgaataatgtagtttgtatgtacccaggaagaagaggaaatgaatttttgatgaagacatagcaagatcttttatcaggaacagagtgggatgataaaaataactggattttgggctccagttatttagatagatttttaaaactatctgttttgttcttctccagtattctcaacacctgacaggtaccttgcagagctcagcaaatgttggttgaatgatggaaaacactggaaaaatgatgggaaatggtgtcacacctgtttctacttctccctccatatccatggagaaattctggctaatttaccaccttctttcttgctaatcctgtacttaacccccagaattcctatcaactcagagctccaggcagacattattattattattattattattattattatatattgttttgagatggagtcttgctctgtcacccaggctggaatgcagtggcacaatttcagctcactgcaacctccacctccctgcttcacgtgattctcctgcctcagccttctgagtagctgggactataggcacctgccaccatgcctggctaatttttgtatttttagtagagccgggggtttcactatattggccaggctggtctcaaactcctgacttcaagtgatctgcttgccttggcctcccaaagtgctgggattacaggtgtgagccaccgcgcctggccaggcaaacattattagtcaactaggaatggctcacagtatgaaacctaattggtatcttgggacattgactttttgctatagtcatttcatctgtaaaactggtatgagccctgtgtaggcagtttctcagaggtgccttttttaaattattattttttatttttatacacagggtcttcctgtcacccaggctgaagtacagcaacatgatcatagctcactgcagccttaaacttctgggctcaagcgatcctacaagtagctgggactacaggtatgcatcactgtgttgtctaattttttattttttatttttatttttgtagagatagggtctcactatgtttcccaggctcaaagtataaaccttttatgtataattcactgatgtcctagtgctggccagagcttatgtttataaaccagtgatcttacattgttgaaatgttagttccttcaaaatcttttgactcagggctctagaatcatccaactgttgaggagtgatatcttcccagaccagactgctgatcagtcacaaggaattgtccttcctcattcatttctgaaatattattttggccaaggttctgataacatcacattttccattacatttttcttgaaaggttttgaagtagtataaactatgccctcatgggccagtgttgagctccatgaaggagtctcagcacttctgcatacccaacaaatgaatggtacctccaggagaggagctgggccactctaactcacccaaacaacttcactccagtttcaacttatgagcttgatggattcttgaccttaaacatgttcagaaatctagcagtcatttaaccatgcttctcagtggtcacgtcttgacatgatcactcatgaggtctatggccagtaatttgttactaattgtatataagtcaccacagtctgaatgatttgccttctttaaaaaaaaataaataggaggctgggcgcagtggctcacccctgtaatcccagcactttgggaggccgaggcggacagatcacctgaggttgggagttcaagaccagcctgaccaacatggagaaaccctgtctgtcctaaaaatacaaaattagctgggcatggtggtgcatgcctgtaatcctggctacttgagaggctgaggcaggagaatcgcttgaaccccggaggcggaggttgcggtgagctgagatcgcaccattgcactgcagcctgggcaacaagagcaaaactccgtctcaaataaataaataaataaataggaacagttattcttataataatgtcattcctattcatttgcattctgacatgctctcctgagcagcagggcagagggaggcattttagctgagcactgggaatttcacaccatcctcagtctaacttatctacatctcagcctgtgatgagagaccattaacagttttgacaactataaattatggtagtgtttgtgagtggtgatatttatggttactgccactgcttatccttttgcttcagtagtatatgccttctcaccttattactagtacctgtgaggggaaagcctggggaaaaaaacaaaacttgttgttaaaaataaaactggccatatttgtttagcttttttcttatataatggcagtttttgagctctttaaatttttttattattcaagtagttgcaaaatgcttttatgaccatcacaccacaaatattttacagaactatttgtcttacttccttggaaaaaatacccagcatagattgtgaggagtatgggttgcatctaaacctcttcacagagagggagggcgtgtggcagaaaagatactgggacacacagttttaacccagtacctccctacacactcacatattgcagggttacctattgccctcactccttctgggcataaccaggagaaaggcatatctgggtcaatacagacaaagtcagtactggcatggctctgtaagctaagtaagattctggaaagatccattggcatacaccagtacaaagtacctcaggcaaaaccgagtcagggttaggagctacaatcaaataaaaagatgattgagaagaaatgacaaagatccaggcagaatgatctgttttggtaagttggtccaaattgtggagggagagagagagagagagagagagagagggagacagagcagaaacagggacagagagatggagagagggagaaagaacagggagagagagagagacagagaaagtgtgtctttgtggtcttagaagggtactgtttattataattgaagggtcagaggcaaggcagataagggtagctcatgaatgattagatggagggttgaataaatggataaattgatgcatggatggttggtgaatgaatgaatggataaatggatttaatgaaattaggatggatggctgatgttactgataaatgaatggtgggcaagtgaatgattagttagatgaatgaacaaataaatggacaactggattggatatacgtacggatagaaagatagatagacagacagataaataagtacatacatacatacattgtgagtgaatggatgaccaaagtgatggattggtggatgaacacaaagatgtattaatgaatgaatggaaagatgaatgcgtaaatagatggacgttatggtaggcagaataatggacccccaaagatgttcatatcttaattactgaaacttttaatatgctagattgcatggcaaaaaagaattaaggttgctaatcattttatcttgagatgggtgagattaccctggattatctgtgtgggcccagtgtaatcccaaggctccttataagtacaagtggagcagaagggacagagtcagagagagatgtgaagatgctatgctgctggctttgaagttggaggaagaggcgatgagaccaggaatgcaggcaagctcaagcaggaaaagtcaagaaaacagattcacccctacagcctccagaaggaatacagttctgtcaacactttggttttggccccttcagacacattttaggcttctgacctctagaagtaaaagataataaatctttattgtcttaagccactaagtttgtggtaatttgtcaccacagcaatagaaatgattgaatacattaatgggtaaataaatggatggaagatagatgaatacttggatgattaaatggatgaatgataaatggataaacacatggttgggtgatggagagaatggaggaatagatacatgaataaatgattggttggctagaggaaggaataagtgaatacatggatacatggatggagaaatgaatagatagactcatgggtaaatgaaagaataggtgggtggattgatggataaatggatatattcgcacacagagagataaaatgtgttagatgtatagatacatggagggatggttgtctggtggattggtagacaaatacatggattgattattggtatgatgaatgattaaatagatatatgaatgggtaatcagtgaatacataaataagtagatacttggttagagatatgattagatagatgggtatttacgtgtgtatatatgcataaatacataaaaagcctttcatggccgggtgcagtggttgacacctgcaatctcaacaccgtgggaggcaaggcagagtattgcttgaggccaagagttcaagactaggctgggcaacacagtgagacccaatctctacaaaaaatttaaaaactacttgggcagggtgctgcgtgcctatagttccagctactttggaggctgaagaggagaattgcttaagcctgagagtttgaggctgtagtgagctatgattgtgccactgcactttagcctgggagacagggcaagactctgtctctaaaaataaaaaaatcaaaaataaaaaataagctgggcgtggtggctcatgcctgtaatcccagcactttgggaagccaaggcaggcgggtcacctgaggtcaggagttcagagaccagcctggccaacatggtgaaaccccatctctactaaaaatacaaaaattagctgggtgtggtggcgggcacccgtaatatcagctacttgggaagctgaggcaggagaattgcttgaacgtgggaggcggaggttgcagtgagccaagattgcgccattgctctccagcctggacaacaagagagaaactctgtctcaaaataaatacatacacacatacgtacatacatacatacataaaataaagaaaaagaaaagtatctcatgcttagagacaaacactatctttgacatgaaatgtggatatgctggagattaggggagtttccagttaggaaaggagacatccagataaactgtaaattgtgtgtaaagctctgaacgtggactaagcctccattctccaggatgaaccagttaaaacaagggacctttgcacttgatggtttctctatctggaatataatactcttcctttaagtaattaacttctaattccctgcatcacagcacaagcattgctttctcaaaggagccttactaaatatactcttatagtattgtgtacctttgctttggagcgcttattaaattagtagttttgcctttatttgtatgttcatgtgattagtaaccatctcctctattagactatgagctgcataaggacagagatcaaaatatttttgcctaccattttctccccatctcttaggtcatacctggcacatggaaaagtacccactcagcacttttttgaatgaatgaaaaccttcctgtggcattcccactcaggaaagatcctgatgggttgctagggcattattaatactatggcaatgaagtctggctttcctgatggaagactttgacagggagagtatttctcctaaatggaaaagccaaccagcaggttcaggactccctcttcctagagtcccctctgcctccagagagaccagagcccctgtctctgggccaggtcaaccaactctttgctttcactcagatcctcctcacttggctgtccttgaaccagcatcctctctgacttgacgaggttctagccatctcccatcctgaactccgtcagttccagctccagccacctgcccctgccttgctctaggctggtagattcggaaaccctacctcttaccaaaggctagcacatcctcttctgtcactctgatcatccttctcttttctcatctccagttagtttcactttgatcttttcagttatctgctagacttcagtttgagttttgtgatctgttcttcccttctgtacccagcacactagggatctaagagaactgcactcaaatcccaactctgcatgaactagctgtgtgcccttgagcgagttacttaacctttctgactctcaatttcctaattcatgaaatggatgcaataaatctatgtccctgggtggttagaggggattaaacaagatgatacacatgaagcatctcgcacagtgactggcaacagtaggtgataatcaattattaatttcctttctttcttcctaggtttgtctctcttacttcttcctgcagcacaatagcaatctctctttctatttttcccttttctgtctacagaatgttttctagccctcataaaaatagcagcacatgaaatgaaattgcacagtatttttatatcttccaaataactcaattcaattatagactggtcaattttagttatttgagcattaccaaagcatctgaaactggtaaataaagttctgtattcacattcagaaattaaagagctaaatggatactttggagaagcataaaggaaagatactttccttgaggcttaagaccttatatggaatgtgtcagcctaaagctaatccttctggctagaagacaatgcacaggaaacccttatagtttaaattcaacacagccgcaatgaagctagtggaagaatgaaggctcacattttctgggaagaggaatttggcaggaggtccctgtgtgttatccacagagtcctcacgtgcatgatttagtgcaggagatctgaaaattcagagagaaagggagaagttaatgggaaagaggttatcaacttattactgggatggttactagaataattggataatagtttgaagctccctaaactaaatggagatttcaagacagggtcataatcaaatattacaaatgcaagcacataagaaagcagacagtccagggttcaaatacgggcagcaccagtttctcgactttataattttggtaaagttactccatctctctgggcccctgtttcttcatgtgtaaattaggaactaagattgtatacatcagccaggcgtggtggcttatgcctgtaatcccagcactttgggaggctgaggcgggcagatcacctgaggtcaggagtttgagaccagcctggccaacatggagaaacccccgtctcccctaaaaatacaaaaattagctaggcatggtggtgtgcacctgtaatcttagctacttgggaggctgaggcaggagaatcacttgaacctgagaggcagaggttgcagagagctgagactaccccactgcactccagcctgggcagtacagaaagacttcatctcaaaaaataataataaataaaaagatcgtatacattacagaagtgtgtggctgttgaacagttcattaaatgcaccaggaacagtgttgggcacctagcaagtacttaattagggggtagggttgattctgaattattattagttatggagtttctggcacatttaccttcacagcttattattgagaaaggtatttgcacagtaatggaaatgttgggggaattatctctaagaaaaggtggtaagactaacatttctcagcaaggtctgggtgaattacagcctagagtctggctatcagacttatagctcaaaaacctgatttttttcagtactgagaagagatctatctctagggcagattcatactaatcaaattcattaggccaatgttttaaccagatcatagtcaattaatttccaatgagaaatacagcttttgaaaggaccagaatactcaggtcagtgtgatcattttctccctgggctcatacctattgggaagccaaatcttcaaagacaaactacataatataaaacttagagctagagaagtgagacttaagagatctaaatgtaaagtgggttcagtctaagctagcccaagccagacatctcatattagggatagcctttcccacactgtatattgtgaaactttagcctctttgccaagccaaaaatggaaaacattcattgatgattttgactgcataaaaaaattttaacttctatacagccaaaataacataaacaaagtcaaaagacaaatgacaaactagaaaaatatttataacacataggtcaatcaaaaggttaaaatcaaatacataaagagctttttttaaaaattggtgaaaattttttatgcaccgattaaaaaaagactaacactgtgtcagaaaaatgaacaaaaggtaggtatgagtaatttacagaaaaagaatacaaatgatttatcagttgtgcaaggaagcacactgcacttacagtgaaatgcttgataaactttgtcaagctgataaatggaagttatattttattattgttacaattcaccaatttggttaatgaaatttatatgtgtatggctgtgtatttttatgtatgtgatattaaatttgtaatatgattaatagctattaatatatatttttattaattacatctatcttttgcctattgctctattgggctattcttcctcttattgattaaaagagctctttatatattcaggtattaacccattatgcatgttaaataaagcctcctccccttctctgggcttcttgaggcaggttcatgggagagaagcagaagataattccctttaaatgaacatccaatatgtaccagattctttcacatggattatctcatttgtccttaaaacattcctagggagcaggtgctgtgattcctactttatagctgaggacccagtggctcagagaaactgagtaacttgcttaaggacatacagctagtaagctgtatttgaactctgaacctaaaaatgtgctctttcctcttggtcatgcaagtggcttcccagaaggctcccagctcttttgaccatcacctaatctctactacaacatctggggacccagttgatgttgccccagatcatacctgaaccaataccaactgggcaggggctccatcagaagcaatgggtaggttaaagttagtcatactgcccttgttccagcatcctgtgtgtttggggttgagtcctggacatctgagtacccactgaaatgcaattccctcttattttttgcttagtttccctctctgcctgaggtcagaccagattttcctcttacacttaaaaaaaaaaaaggaactcaaactaaacagcagcaaaccatctcccctccttaagaggaggaattgtaatttgattggtttaagtgctaggtgggatcactaaaaccatatccaggaataaggtcttttcttctgcctgctgtcaacatctgcagcatttgcactcaatgtattagtcccacccagttacctacagtgccccaaataggctttgctctaacacgcctccatgcctatgtatggactactctttcccacctagcaaatgcttttacctccttcaagttccatctcacctctgctatggagaaccctcagaccctcctttccactgtgaaggacccccaggccctgctttgaaaaaaggcagagttaagtcctcttcatctgtgctccacagcttctgtgctcacctctgccactgccttgaccatgtttttgttgttgatgtttgttttttagagacagggtattgccctgtcacctagctggagtcggctccatcatagctgactgaagcctcaaattcctagtctcaagcagtcctcctgcctcagcctcctgagtagctggtactacacaggcacactaccacacctggcttttttttttttttttttttttgtaaagacggagtctcccatgtttcccaggctggtctcaaactcctgggcacaaataagtgatcctcctgcctcgggctcccaaagcactgggattacaagcatgagccaccatgcccggccccttgaccatgttttgtggtagtttctgtttaatgtgtctgggggattccccactgaactcaagcagggatttccttcagagcaggagccataatcaaccatctcttcatctccggagcccagcacaggataatgaatggatgaggatgcctctgagtctgaggtctctccttcccacctagcctatgcccagactcacagagctggtttctgctttgtatctcactttgatttgcttgtctgagtaatttgcttccttccccagctctctagaaagattgcttccatctcaatcttgctatgagggcccaaatacttcttgatttgtatcacctgcttctggtctccttatcactatttctggctgcctgttgggagaatcttgaagcctgggcttcagtgacaacactgtaacctcttaaacactttctgagctggtagagttctcacagcccctgtcctgttcctggagtaagtacaggaccaggccctaaccctcccagccctctctatggtcttatgggcatgaggccaggcctcttcatgaccgtaagactcaaacctttgttccagcttcactcctatcagtctgcccctcctacaccactccaggcacgcagaaggcaaatcagctgagtcactctcggccaggagttctgcagcatcacaagagaaatcaacagagcaggaggaaattggcttatttcacagagaggcacttggagcaaccaggcagcccaaagcccctgggaagccaggcaaaggaccacctaggtcataactgcatcctctctgctgttgtcactctttggagaaaagtgttttcaggacccagtcctcagacccattcacacctgagccaactccatcagaggagagggaggatgggaccttaccaggctatggggtctcgaaggtgagctgctggagcaagggatggaggactagtaagactgtttgttctaaactctaggggaaggatgtttgaaggttgttgctgagttagtctttagaaacttactgacactcaccttggccagccccaaagattactgagacataattcctgccccagatggctcatagtctagcaaaagaggatgttaaagctttctaggttgggatcttgtagaggaaagaaaatacaagtagagacagagaagtacaaacaaagcccgctggtgtggagtgtagttgaagggagagtgcattggccagagagttggaagagctgatttcattttttgaaatacgtattgagaagttcagatagttgcggtacgatgggagtggaaggagatgaggctggagaggtaggttacaagaggggacttggtttggaagaccacgtctctacagtggaacatttactgagttaaggaacacaggttgagcaagcagacctgtgagtgaagatgacatgcttaggtttgcccaagttgaggctgaaatgcagagtgggctccattcgctctgtgtttgccacatccttagtctttctgaggaaggtggctctagacctatagtcctcatacaggactctctatgaatagtaatcagcagatttaatcacatcctcgtttgggaagtttggatctaagagataaacagcagaatggcctggaagttgagagaaatgcagaaaatgggatcacacctgtaatcccagcactttgggtggcggaggtgggaggattgcttgagttcaagattagccttagccgacagtgagaccctgtctctacaaaaaaatattttaaaaaaagagctggatgtggtggtatgtacctatagttctagctacttgggaggctgaggcaggaagattgcttgagcccaggagtttgaggctgcagcgagctataatcatgccactgaactccagcctgggtgacagactgagaccctgtctccaaaaagaagaaaagaaaaagcagcagcagcagtagctatggggtttttctcgtgctgttcttgtgatagtgaataagtctcatgagatctgatggttttataaatggcagcacccctgcacgtgctcttttgcctgctgcctcctaagacatgcctttgttcttccttcgccttctgccatgatcgtgaggcctccccagccatgtagaactgagcccattaaacctctttgctttataaattacccagtcttggggatgtccttatagcagcatgagaacggactaatacagatacttagtagccaaaaatagtaaatatcctcttctgagatcagttaggtctccctccagcctaggtcaataaaatccttcacattattcaatccagcacaatcagaggccagaacctcagagaaagaaagtgtgcattgtttgggcttattctctgggctcatatttctttcaaaggcttggggagaagggatgggcagtagtcgctgtggcaggacaggtttcagatctcaggaattttgggcatcctccaaattccattatccccaacaagactcaactcatcacagttggcaaacaaccctggccaagacagctccaagttgagaactgaagggtgagtagctgataggcaagtgaggggaggtggttagaatattctaggatatgcgaaggcttgatgcatttgggtaactgaaatcgattccatatggctgggaaggtaagcacaggaaatactgggatgccatgaactagagaggaaggtgtcttagggagtttggattttatactgaggacagagggatgccattgatgtgctttaatctggggaatattagtttcatgatgatgacggctttgttttgctcactaccatatccctagcacctaacactccataggtactcagcaaacaactggaaatgaatgaacggatgactgctgtgcagaaaatgtgtccagaataatcagtgaggaggtgactatgtagtccaaatattaaatcacaggtgacctgggctgtggggatgaagagaagtgcacagattcatggcatgtttgggaggtagaataaattacatgctggtacgggcatagtgatgctgatggtgggaagtgtggtatcaaggatgagatcctggtttctaacataacaactgaatagctgaaggtatcattacctgagatacaaatgactggaggggtaggtcaacggtagagtaacaaattcatgtgccaacacatttagctttaggtgtccatggaacatccaagtggaggcttcagctgttgccagtctttgccctggagaagcacacctagacccagatggatcacaggtggagctttagcctcccctctggagagcaatgccagggtctgtgccagcaggggcacctgagcccagtgtgctgggaccctgacccagtctctgctcttgagtctgccattcaatatctgtgagtatgcattatcaagggcctactctgtgccttctcctgacattccccgctccccctcccattcctagactcatcatttcattagtactgtagggaggatggccagcattgctttgatgaggactgagcctgaacactgcaccagaactgctttctcagaattatataagctaggacagaatgcaggagcctcgatttcagacagcacagactgacaaaatggagtgctcagatcatgttgtcttgcttgtgtagttaaaatagcaaaactaaactaaaacaaatcgcctaacaaaaatgtttatttatacacattctaacaccttagataagaaaaagaatcctgttttatcattgcactgttgtcatgtcactgcgtcactcccccttctctgggctctgatgtgaggccagtctgccttacagtcatcagcagcaaggaaattacagaagagaaggcagaagggttggggaagaacttggtgatttgagttcgtaagtcaccaagtggtaactgccctgtttcttctctcgtgtctctggggcctggatgtttgggggtgctgggcattgcttctgcctgtgaaactgcagttttggggttactgtatcccttctccctacaaatttctgtacaatttatgagtacaagacagtgtcatcaacacaaacagtaaagaaagaaacagtcctgttgattacatagagagcacgatcaagatacaaagcgttttctagtcgagaagacttccctattgtgttttgtgtgataatatataatttatcacacaaatttaataatttaataaggaattaaaattgtgcataccttttgaaccttgatatacacatattacatgctatttatttaaatgctaaaatcgttttattctaaacattaaataatactttagcaaatataatttaaataatgaggcaggtgctgtccgcattctgtgtcctctcagatccgttccctgtcctccttctgctttgctctgtgccacagtgagaccgacctcccagcctcctttcttgggctcctctgccagctgggttacagctagcttgaacatgggaggcaagagatgggaggacaggaagaaaggagacccccaggtgtttctccccgcctctgccacaggtggcatcttcagcagttgctgcatcttcttcttgactccagctctcatcagatgtgcttaccatggtcccagtttgctccagtgaccctaaaccctgagcaccagtaacatcacctccttttgtccttacagcctagggctggtaggggtttctgctattgctaagctctgagttgcttcaccatcttcagtttggcttatcagctcttctgtcacttggaaacccaaatctcagcattaaattgcctgttttcaatactttgaatggttctgttttccattctgttgaaccctgcctcataaatgcagtgttatttaaaagggatcacggatggaggatttttgttatttaaactgagaatggccactttctgaaagaaggtgcaaggaatcagaagccaaagtttgcctggatcttgtaggaatatggcggggggcgggggttgggggaggatcttgagcttcctggctttaaaattaacagctttggggaaaggatacccaggtggcagagaacgatggtgaaagggccatccctatccagtagtactctttggtgtctaagagacagacttaggctaacttaagcaaaaagggatttattggaagactataagaaaagtcacagaattgtaaagaaagctgaataggtcagcttttggaaagaggaaaaagggcatctcagggatctagggagtaggaattagcagtccttttaggaagcttggatggagtagctgtactataaggtcatcactttcattcctggatcattctgctcaagattcaaaatccagagagggaaagggtccaatgggttcagcataaattaagtgcttgctattgcccaggggagagcaggaccccgaggttatgtgcaatgcaggcagagattccccccaaagaaagaacagcttgaaaactgtgctatttgcaccctgggcctaccataaaaatcagaagtagggaatgaagaaatggcccaaggcaagtagaataatcttcctctacagccaagaaactagccaagaacccaaatggtggttaatctaaggatccagtggctataccttgagacactggctggggcccagatgatccatgtggacttgcttccacttttgtgccaaagacagctctgcctgcccccaagtaacttgggacccaacaggactaaaccagtcaattctggggatggatgagatggggatgcagtgggggggacagatcctcagacaggaggccaaagcgtaggacagggatagaacctactcactttgttcttagggtatgttagaggataacatttgtttgtactcagagctctttagcaaagagttatttaacatgcgatgtcattgtccctgaaagccacactcaagaagcacccaagggccctggtcaataaaaaaaaatcttatcttcactctctatggtggaattgttgggcgaaagcaatgacagcatgaaagggattacgaatgttttactgggatcaagtgggtatcagctgtgcccacacatgggggtatggcatgtctgggtatgtctgtattgagcttgccaaccagacatcagtttgcataagggcttcttgggagaaaactcacccttaaccaaaaggaaaccagagaacaagctaacctagtaaatggggccctcgtcttgggcaattctagttcaaagaggagacttccattcagatttgtgttcagtaggcacatgtctgaatcttaaggtggtggtggaggagggagacagagaggggagacacacacacacacacacacacagagagagacagagagagagagagagagagaaaggggagggatataataaattctgaaatttgaaaaatgaaaacatgctataagtgggaaaattggaagagttgccacactagatacttggtcaagccctgccttcaagcagttcagctgtggatctgtcattgattctcaaggcctggcatcttgtgtatctcagcatttttggcagtgtctggaagaagagagcataactgagcagatgcagctgtgctcactggagcgtgggtggagccaaagaagaatatacctgcaaagctttcaggatcacctcccaggcttgtaaatacgtgggcccctgaattatctgttgtgaggctgttatctagaagcaggggtttggggtttgaagctagggtcgagaaccatcagaatacaaagtactggagaaagaacattccaggcagagggaatggcagggcatggagatcttaatagcctgaatacgtcttgtagtacaggcccagttactctcatttgaaaaatgtctagccatcttcatctcggtggtgaatctgcagtggaactaccttggctggtacttgcatccatgttaaagaagcccagttttttaaaggctgagtatgtggttcaacctgggggccggctggcctctctccctccttctgaatgcttcccttccttcctttgtctgtgtccctttctctttccctcatcagtccttttcttctgtaagaccagtgctttgcagtagctaccttcaggaaagctgatggttcatgccttccaggagagaaagttcacaaattgcaacatggttttgtttttgttttttgttttaaagctgagcagcaggatcacagaacctgcaggtttgctgtctgctcagcaggacaaagagagcagagagaggaacatgaaaaccaagcggaccagaagaaaggaaaacatgaaggaggctcatttaaagggggaggagactttgcttaagatgctggcttgggggagggtgactgcaccaaacatgtgctgtttccagggtccagatggtgtcatttgccctgcaaaacaagtaatagacaacatgattttgatgctcagaaataaatctgtgagtaagtcatttgggggaaatgatgcccatggctgttatactcacaacagaagagattcaactacatttgaaaacaactgccctgccttgctggcctctagttcatttaaatgctgtatttacattgttaccagctgtatttgcacagctagaacttccacctgcttgataatttacttaaggtacatattgtatttacatgatatagaccagagtagggaaactggtcatacctgtttggggctggaaagagcagcagctcatctgaaattttcatcttggcagacccactgcctttgctataggtgctggcacatagtaaatactgtataataataataataataataataataataataataataataatagttaactctcatggaatgctttaaggtatggagagtttctataacttacccacagttaaacagctattcatgtactaaagccagcatctgaacccaggctggatctggatgttttagtactggttgttcttcagcataaagacccctgcttcaagatggcagattgaacaagtgcaattgattactaaccctctcttccaaaaccctacaaaaacaacactgcaagaaattgtaaaatgtttaaatgtacgaagataaagagtgtgggagagcagacatatccctatccctaagcagcaatacaattttagaagctggaaagcacatgaatgaatggtggctgacttcgcagacccagaaagctgaatcctaaactggcagtgagaaaagccaagaaacagcaacctgatttcatggcagaaactccccaaggctcaggaattagtggcaccagatggggctgaaacaggaagattggttcaaagtctgatatgcagattcctagatcctttcttcaaccccagcagaagattgcatgtttattttcttgtggaggtaaaagagggcttctgaatcgggggtgccaggtacaattgagggctgggatattccctgataatagtagggaaatcagatttaaatttgcatactgactgtgagattcccaccattttcttctcttctctcacaactgctagaatgcttgtaaccagaattattacccttgaggcaggagagtgggagacacttttctctgggaaatatgaccagcctgagaaggcggacctcacaaatggatccaggaggatcaccaaacagtgaagcccatagaccacatgcccaagccaagtgcaaagagcttttgattgggtttttaatgctttactcttaagcatgaccaggcaacctaaacacttaaacctaagcctaacccaaacatcgaattatccaagcaactattacagagcaaaaggggctttctgcctgatgcactagaagccattactaagacgccgggcttttgagaaaagaaaagatttttattgtaagttgactaacaaggagacaggaatccagctcaaacctgtctctctgcgctggctttcaagcagtcattttattaggaaaggtttagggagtgagttctgggattagcaggtgattggtggaagaagaggggaggtctggacagtccttgggcatgtgcagttatctttttatgctacctcatggagcacatgtgcaaatttggggggagttagcatgaaacatgtggcggaaattcaagctgcgattcagcaaactggttctgcacagattctagttggccatattggttccgtttgattccagccagttttgttatctcataagcagaggaaagttcagcatttcagcaagttatttcttttcttatctgttgttctgtgcaaactcaagaatttctgttagtcattgaacagagagagccgatggaaggaaattatcagagaaataactgaaatctattgaaaataattgaaatattccagaaaagaaaggcatgaatttccaaatttaaagattccaaagagtggcctacataaactctggagatatttccatctcaagtcacatctttcttttttttttttttagatggagtttcactcttgttgcccaggctggagttcaatggtgtggtcttggctcactgcaacctctgcctcccaggttcaagtgattctcctgcctcagcctcccaagtagctgggattacaggtacctgccaccacgcttggctaatttttgtatttttagtagagacagggtttcaccatgttggcaaggctggtcttgaactcctgacctcaggtgatccacctgcctcggcctcccaaagtgctgggattacatgcatgagccactgtacctgacccaagtcacatctttcagaagtatcagatcactggtgacaaagagaacatccccaagtatttgaagaaaggctccagtgtgaaagataaagacgcacactactacatgcaattttgaggaatttgggatgatgtaggaagaagatggtattagacactgcactcatgaagaaaaggacaggatgttatgaaaggggggatgatcattttaaaaaagaggctgtcagaatgaaaacagctgtaatggaacagataaaactattttccttggatatttagtggatcttgccccatggtgttggatctgccacttgagaagtctgatgccattatggtttttgacattttctatgaaagttgcttttactctctggaagcttttagcatcttttctttgtcaccagtgatctgatgcttctaaaagatgtgacttgacatggaaatatttccagagtttatgttggccactctttggaatctttggaaacaactcatgcctttcttttctggaatatttcaattattttcgatagatttcagttatttctttgataatttccttccattggctctctctgttctttatttttggaattccaattattcacttgttgtgccttcctcattggtgctcaagttctcttatatttaggccaggtgtggtggctcacatctgtaatcccagcactttgggaggttgaggcaggtggatcacctgaggtcaggagttcaagaccagtctgaccaacatgctaaaacccccatctctacaaaaaatacaaaaattagccagatgtggtggcaggcgcctgtagtcccagctactcaggagactgaggcacaagaatcgcttgaacccaggaggcggaggttgcagtgagccgagatcaccccacagcaccccagcctgggcaatagagcaagactccatctaaaaaaaaatctcttatatttcctctgctattggttacctctttagctgtttgtccttcaaagagatttccttatttctaggcgaatcctggagaagaagccccaggaagtatggactggaagactggggaggcaggccctccaagaagacagtagcatcccctgatgtggcatccaccttcctctagtgtttgagatgtgggtgcgacaagttggcattggaaggaaatccctgtctggctcttgtgctaccgtagacctggaaccctggaacaatgctcttgtctttagcccctcttctgctttcccattgttcaagccaagccttttccattttgcctctacaatggaatctaaggatagagaatgggataattggggatatgtgattgtctcctgaatctgagcctattaatatatccttctaaaggcattgttcctactgaccaccccaaagaactggattccatgagtgtccagcaagtgactaagattccaatttaggccttctcttctaagagccagtacctggataaaaggcaaaattcaacctgatagtctcttatagcagtttagggaaccacaacttgtcaggaatacaggacagcaggatttttgttaggcctcaggtaacacaccgctgcctaggccttgctgcgtcctgggatgccagaggacttgtttccttagctacaatcatcatgtgacaagaacacacagagattcggagatgttgcttagcaaccatgctgcacctgctggggctctgggccagcagcttgggccagggagcctggctttgaacttggaaactcccataagggctgtcaaaaggaggaagacctaatttggggagactgttttggccctgggcttttgcagagatggtaaaggtacagatggagaactgaggctgaggaaactggctttcccatagtaatggagaagggtggtgggcgtgggaagagcaggactagtgggcagagacagactgttgggctgatgtgggtagcagttccctgcctgacctaccctagagaaaatccttttgtctcagaggatgggtgttcagaaccctgaggagggatatgcctggctcaagaaccagttccatagggcttcttagggacctgaatcaagccagaggatctgttccctaagagtcagtccaaggagaattcccttctggaagggagcagagtgcttcacaatgggtgacattggtggtggtcagggagcgcaatgaagtagtatcagaaactgggctgttcaaccacagggccactggggagctgtccatggtttggggtaggctcctcaccagctctggctgtctctctcactctctgccagggcccagttgatttgataggctgtggagtcagattgcctagatttgaatccaacttcctctcccaggggaaagggactaaattttgtgtttcagtttatctgtctgtacaatgtggatggggatctcaaggactgttgtaaggacaaaatgagttaatcacacttcttggcatatactaaatggccagtaaaactatcatcaccctcatccccaccccaatcctcacccccagcaactggcccaggggacaaagtctatggccaggtattctccaatctttcttgatacccctggagcacatgggaataaataatggcgagaatctataccctctgcatttgcagatgggaggagcattcccctccctgcttgctgaggatttgaatatccttaaccaattgactttgttttagtgaaccaagtactcctccaacccttgatgccccaaataccctaatatcttcactttggtgctgctcatattaaaattgtacatatagcatggcactttaggaggcagtgagatcatgggttcaggacttgagctcaaatcccagcttctgttatatcctaaccacgaaatcttgaacaaattttatctcctctctgagcctcagttttctcatctctaatacagggaagtgatagtacctaaccttcttagtatgagatatgcccagctcttgataaatgttagccatgttaccaaatttctctctttgtggctttatgaactttatgaactggctccaagtgagaatgtgaggaccaagggggctagtagattccaactgttcccctaaggggagaaagggaggagttaaagaagctgatggttgaagtgcccccctcctcaatactccaacatgggactggcagctgcaatagcatctttgtcctcctgtgtttggacactgactattctgctatctggtgctgagggaatcccagccagcctgccttaagcattctccctaccctccactccagccagtccgaggtccctcaacactccccctctctctaagccatgtcaaatgctggcgcctgcccttcctcctttctcaaatgagcttgttccccagatgaccctacagctgcatggttctaagattagctggatcctgcatttgactctgataattaattacccaaatggagaaaattgaatagttaactggttcacaggaagataattagcttttctgagcccctgttacaggcaaataaagaggaggattgtttctcaattgccttcattaaagggagtccctctcacccaggagccctgacccagaggcccttgggggccctgaggggttctgtagtgctcctggtgctttatctcaaaatagagaggcagctggtacagtgtagccagcacaggcttcagactctaagcaagcttgggctcaagctccgcctctaccatgtattacctatgagaccttggtattgcagtacaacctctctaagcctccctttccttatctgaatatgggaataatgctgtgtaactcacagtggtgttataagcattaaactacataatgtcagtaacatgccctgttctgcactcattgatagattttttcattgataaagttcttcataaagtttattgttcattgatgaagtgttcattgattgggaaccattttaccatgtcatgattgtagctcccatcatagcatatgctcccatatcatggaaacaagggaaacacatatgaaagccaggagaacagcaaatcaagattaaatcgagcatcctatgctgattggtgcagggtctacacacagggtggggaagattcatgaaggtcttcttcagcctgttcaacttgtctttgtactgatattggctctgccctttgatactaggctttctgggtcaccatgtggtcactcttctgtcagcagcaatccctcaccaaccctctctcaagcacagagactcatccccacctacttgactgcagtctttctaaaattttatttactctgcccaagcccagctccctggagtgtttatcactctgacacgttcagcacatatagatacgtatgtagaggttaagagcatgggccctgagccagactgcctgagttcaaattcagcttaggtacctactctgttacttaccttgtgcctcagtttcctcattataaaatgaggttgataacaatagtacctatgtcatagaattattatgattaaataaatgtgaagtgtttggagtagtgccttgtaagtgctcacacgtgttatctattattattattcagttctgaagctggattaggacaaggagaggtctacagattgaggaaaaaaggcagggccggaggccttcacctggctagtacagggaagtgatagtacctaaccttcttagtatgggatgtgcccagctcttgatacgtgttagcaatgttaccaaatttctctctttgtggccttatgaactttatgaactggctccaagtgagaatgtgaggatcaagggggctaatagattccaactggtcccctaaggggagaaagtggggagttaaagaagctgatggttgaagtgccccagctgagtggactcagaggcaactggaccctctccgcagggacgattaactcctgggtagcaatctcacattcttttaggtaatatgttgtacttcctcatttctgcttaaaccgccaacaattcttcccatagtttcactctcagctaataactttgcatcttgtttcactgagaaaatacgggtcattagaaaagagcgtcaacaacctcccccaccacgtttacttcctgccagggctctgtccatatattcagttttcttttttttctttttcttttttttgagacagagtcttgctcagtcgcccaggctggagtgcagtggtgcaatcttggctcactgcaagctccgcctcccgggttcacaccattctcctgcctcagcctctccagtagctgggactacaggcgcctgccaccatgcccggataattttttttatttttatttttatttttagtagagatggggtttcaccatgttagccaggttggtctcgatctcctgaccttgtgatacacccgcctcagcctcccaaagtgctgggattacaggcgtgagccatcgcgcccgtcccatatattcagttttcattgttaactacctgtgttcttttccaaggccaacattttacttattgctagatcccattctttcttgcttactcaaggacactgctccagcatttttccctctctttcctgaatcatcagtttttttctctctactggaacattcacatcagcataaaaacatgctgctatttctttattgtggaaaaaaacaaaagcaaaactctttatctcacaatgattcgagctactacctcattgctttgcttccttttgtagcaaaacctattgaaagaagtcgttgttgctgtttttaacaattgctgcctccaattcttcctctcacattctttcttattttctttccttttcttttttttttagacggtgtctcactctgttgcccaggctgaagaagacctccatgactcttccccaccgtgtgtgtgggaagtgcagtggcatgatcacggctcactggctcactgtagcctcaactcccaggctcatgtgatccttgcatctcagctcttcgagtagctggaactacaaccacccaccaccatgcctggctaatttattttattttgttttattctactttattttattttatttttgtagagacaaggtctcattatgttgcccgggctcgtcttgaactcctgagctcaagtgatcctcccacctcggcctgctaaagaactaggattacaggcgtgagccaccatacctggtcctcccatcctttcttgaacccactccaatcagtctttcacatttaccactctagcaagactgaattatcaagatcaccaattgcctccatattgctaaatccatggtcaattctcagttctcatctttcttgaccacgtggtagagagaggttagctgttccaagtctcttctttctcctgggcaccagctggatcacattttccagacttatttgtagctaggtgtggtgatattgctgggttctgaccagtggaatgtgggtggaagggatttatgtaactttcaagcctgacccacaaaacctttctgtgctggaggtctgccctcctctattcacctttttccactctactcctgccttaggagcctaaccactagatactttatcaatgagccttctggtttctgactgggtcaagtcaatcagaggtatctgtaggagactgggaggaagaaggagaatgaggtcagggtacttattcccttggcttcctctctttagggttgctttgaattggccacttcctttactgaagcttcagttaggcatctcaccccacatagctcttcctctctcccaattccactaaccattattttctcttgcctcttcagacccaggggtggtaaaagctcctactgtcaatcatctctgggttatagcaaatcctttgatagctttcctgcccctgctcacacctttataagtaatctctttattaaacctttctcaaatttgagtgtgtcctctgtttcttgccagactctaaccaatgcaccatcctcatctctcacctccatttactggctggatagagtgaccttggaagccacaaattgaagataaggatcaacataagaccctgactgctgtcatggagcagagagctgctgtttccctcctttcatccttcccctctgctgctgaatatacttcacatgaatgagaaacaaagttaggttgttgacaccactgagatatggggatgtctctatttcagcatctagtttgacttgactattataacctctctgcagcatcctgggcagctgatgattctttgctcctggaaacactttctgtgcttagcatccatgacattgcattatcctggttttcttttcactccaacaactactctttcttggtcttccttgttggctcttccttatctccccatctaaatgttgaatttccccaggctcaatccttggtactcttctccatatccagttacttcctggtgacttcatccaatcctcatggctttaaacactccccagtttagatctccaacccaggcttctcccaagaacttatggctcatacatctaactgcctgcttgacatcctcttttaggtgtctagtagcatctcaaaaagaatacattgaattccagacttctttaaaacttgcttatcctgtatcttccctcaagtcagcaaatagcaattccatgcttctggttgctcaggccaaaatctttggagtcatccatgaccaatcttttggtttctcatcctgcatttaatttataagcaaattccatcagctttaacttctaaatatacttagaatctgacaagtctcaccaccacctctaccattggtgagacaagaagtaaaagataaagtgctgtaatggccaataagactctacgtgatctgattccattacttatctgacctcatcccctgctactcttcctctcactccactccagccatatggacctccttgagtttcatgaagctaccagcatactccagccccaaggtctttgcacttgcttttctcttaccctggaatgttctgatcccagatagccatgtggctcattcctttgactcctttaggtctttgctcaaatgtcaacttgtcagggaggactttcctgaccgttctatggcaaacccctttcccttataagactgtctaccccatcttcctttttttttttttatagcactgatcactatctgatgtgctgtacattttacctacttattgtctgtcccttcttgccatgagaatgtaggtgccttaattgtaaggatttctgattgtcatgctcactgcagtatctctagcacccagaacaatgtcttgcacatacaagtatttgctatataaatggatttatttctcttgaaatgttaaaagggtgtcagctgggcacggtggctcacacctgtaatcccagcactttgggaggccgaagggggcggatcacctgaggtcaggagttcgagaccagcctggccaacatggcaaaaccctgtctctactagaagtacaaaaattagccaggcatggtggcagatgcctgtaatcccacctactcagaaggctgaggcaggagaatcacttgaaccagggaggcggaagttgcggtgagcccagatcactccactgcactctagcctgggctacaagaatgagactctgtctcagaaaaaaaaaaaaaaaaaaaaaaaaaagtgtcatctgcttcccaaccttgacttacatgatttcagagctcattccaatatcgcagcctcatgaggcaccaggcttcaaggaaaagggagaaaatatatggaagcaaaaccatcctatcatatcatagtcacctttattattactgaatctcagccttgaactcattggaatgtgaagtcttctgagaaggaatctcttccccaaaccctatccaaatctgcctggttcctctctcagacacagatctacagaccagaactttcagagaacttatcctcttatcttagcagatataagactgtcagggccttctgtagggaacatacagcaaaggaatgggacaagcacagttacttttaggaccatttgaactggctttagagtggagttgaaaagcagttttgaggaagaaatctgtacccctaagcctcaaaggatggtcattggatctcatttagctttgtttcactagagcagaaactaagtttccccctaggagccccaagaacatattactcctcaggtagatattctgccaatcaaagggtggaagcagatatccctgggaactcacctgggaagcccgcatcatatagaagtcagggtagttctttactgactcctaataacgtgttttaagcagagaaattgtattattagatttgaaatctagaaaatattactttgaaacacaaaaggaaagaaaatcataacaaagcagaggtgactgtggaagctggtgtgaagaatgggttgaagagagatgagaatgaatagaaggagacccggaagttgtttgcagcaattcaaatgtgtggagagggtggatggggtgatccaaggaaaggcaatgcaagtgagaatggagaaaaatgggtgagtgaattcaagaaatggtactttattttctttctaaaaagtgaccctaatgctataactctttattttacagttctttcacagctgtctatgtcttccagggtaaagcacagtgcttagtatgactcttgctcattgccatgtgtaccataagctccagccttgctgaaaggtttttcggtatcccataagcactaggggagctcaggccctcaaatatttgcacaaaaattccccttaggcctggctgaccttatttcctaatgttcgttctgtggcttctgcccctaccattaaaatactatcactaagtttatcaatgacgttcctgttgctaaatcaaaaacatgtttttgaatccttatcttatttgatcttagctgaactcaacatttggccacttcctccttcttgaaatatatatatgtatttttcatttttatagtatgtgcttagcactattctgaaagccagggatagagtgttggcaaagtagacattattcttgcctttaagtaagatgtgatgaggtccaatcaaggatagaagtgtaggaacaccagcaattgaaggagaggaataagaaataagaaacatgggctgttattagttatcatcgtcttggaggttctagaaaatgccaaaaataaacgaaatggctaacataaatattggaaataaagagctaaacctactcctttttttctgttgttattaacaagaaaatgcaagaggtttcagtagaaaaaaaaagagtatatgaataagataatttgatgatggcttgttagaaggtaaatatacaaaaaagatccatatattttctttagtctatcaataaatacttagaagtgggatgggaaaatgtttataatagcctcaaaaactacagaatagttaagaatatatttaacaggaaaggcacaggaaaaactatataaaaactctaaagtttattgaaagacataaaagaacccaataaaaagtttaccatgttcttggatgggaaggcataatacaaaaattttatatatcaatttattgtaattccatttagaatcccataggtttttgtttgaattgaataaagtgagcttgttctatgaaggaataaatggatgataattatgaaaagaagacataggagtaatatattgtcagatttgattaatagtctgggaaaagcaaattgaggtaacaccactttatgtccaccagactgcaaaaaagtaaaaaggagctattgcgggtggggatgtagcaaagtgtctctcatacattgccaatggaaatctaagtgatgcaggctttctggaaagcctagtaatagctattaaaatttaaaattaatatatccttcacccagctagcctactcttaggattctatctcttagaaacaagagcaccagtatgcaaggatgtagatgtattgcttgttaattgtgaaggggaaaaaaaaacccagaaagaaagctaatgcccactaatgggagaataagggcatacattttgatactttttttgaagccatcaaaaaacatgaattacgctgggtgtggtggctcacacctgtaatcccagcaatttgggaggccgaggcgggtggatcacctgaggtccggagttcgagaccatcctggccaacatggtgaaactccatctctactaaaaatacaaaaattagccgggcgtggtggcaggtgcctgtaatcccagctacttgggaggctgagggaggagaactgcttgaacccaggaggtggaggttgcagtgagccgagatcttgccattgcactctagcctaggcgacagagtgagactccatctcaaaacaaacaaaaaatgaaaaccatgaattagagctataccaatgaacatggataatatttcacaatgtattgactgagaaaaaacaagatgaagaaaggttttttttttctcccagaaaacaatgacagaaaactgtataaaacttatgtgtgtgtacgtttgtttgtataggtctgaaaataattatataagcatggggggaaatacgaagggttattttaatagtattagattcacctatgagcaaagaaagcccaaaataacaatggctcaaataagatacgtagttcatttctctctcatgttaagctccgtgttaatctggagctgatgtggtttctctctttcatgaaaatctctggaacccaggctccttccagctttctgctctgccattactagaatgtgaacatcttgaaagtccagcctgcacagtttcatcctcagacttcacgttccatgtagcaggttagagaaagaggaaggagaaagggtatatgtaaattgtctcttaaagatttctggatgcgcaacaaaatgctcccattggtcagaacttagtcacatgaacacatctagctgcaaaggagaatgggaaatgtagtctttattctgtgtggctatgatcccacccaaaaatttcgtgacgctttgcacgcatgcattcttgtagacaacttaagaatcagtctttcaagttccaaaaataatcccctgggtagtttgactgcaactgtattaaatccataaagtgattcagggaaagctaacatatttataccatgtaatgtggtatacctctccaactttttatcttgtttggaatattttagaattttcttcatgtaagttttctgtatttctggtcatagttacacacagttatttacagttattgttgcaattatgaatggaagttctttttagtacaatttactaagtggctatttttggaatataagaaagtcatagatttatatttcttgtattgaaccaatttattgacctttcttattaatttcagtaatattttctgttgggtttcatggattttctaagaagaaaagactgtagcctgaaaatacaaataatttgctgtttcttttaatatgtatttcctttgtttttttcttacctaatggcactgttctgagactccagaaacattttgattaatggcaataatagtgagcatcccatttaatagaaacgcctccagtatttgtttaatgttttaccattaagtttgctgcttgtggcttctgattttaaaaagtgtccctgggccctctgttctttgcttagtaaggtgtttatcattatttttgtcatcactgtcattattatcatcatctgaaatggaggttatactctaattaatgcatttgggcatatattgagatgatcatatggtttttttcctttcactatctgatgtattacaggatgcttagttcaacaaagatttcttaatgttgaaccaatcattcttcctgaaataaacactacttggtcatggtacataactcttttaatatactgcttggtatgacttactaatattttatttaagactttcataccagcaagtgcttggttagatttttgcattataaaatgaaattggatcttttttgatgctagtttaaatatctagtttaaacaacatacaaatggtatttttaataagatttcctagaacctactcataaaaccatctggggcagaattacctaggggcatagattatttacattttcagttttatcaatggattttagtataggttccttttgttttgttttagtttttagaggtatgtacttgctctgttactcaggctggggtacaggggcactatgatagctcactgtagcctcaaactcctgggctcaagggatcttcctggcccagcctcccaagcacctaggactgcaggtgcttgccattatgcccggctgattttttaaaacatgttttgtagagacagggtctctttgtgttacccaggctggtcttgaactcctggcttcaagagatcctgccacctcggcctcccaaattgctgggattacaggcatgagctactgcatctagcctatataggtttcttagaatcaattttaggagcttatatttttatgggataccattcattttaggtaaatgttcaggtatattaacatcaattttaacataaaattttcaaatagcttaattattcttaatatgtggagataaagaccctactcctgagccctggcattgtgttacttgtgatttatttcttaatttttgcttatgcttaacagtagtttttccttttcttcttcattttcgtctttttaaagaagaagcttagttttatttatcaagtctggttattttgacatcttagcttttatctttaataattcctttctcctaaaatatcgatggtctaccctcatacttattgatagctttgctaagagaattctagttcaaatttttttacaaagaaataaaaaagtcattgctctattataataagaaatgagataaaattgttcatatcaacaatgtgttacatacccagcgctgttgagtgtgtgagtaaaagccactttcagacaccactactgagaatgcatgttggtacaaccatctggcaggcaatttgacaatatgtatgaacacttaaaatgggtatacatttgaacaaaaaattgtacttctagcaatttacacttgggaaattaactagatcagcaaacaaagatgtatttacaaggatagcctttagagtattatttctagtggttaaaattgggagatggattgaataaatgatggcatagccatataataaaatactacacagtcatgaaaaagaatgtgataggtgatgttttaagttgatatcaaacagctggttaaaccacagaaaatatgattccatttatgtaattatattacatataatctggaagtgtgaagtgtggctatttctggagacaggcagtagatctttaacattcaccattttgtgtcattctttcaataaatatgccttatcagaaaaaaataattttcaggaaagaattccagctgcttacacattctggattatataccataaggatttattacatgctatgctgggtagcagaagcgatgaggaaagggagggttagtagggttctacacttggatggtgaagagaaggtaatgtttttgcctagagaacgtagaggattgatgaaagtttcttccccctcaccaggtagtagacacttcaagagataggggaggagtcccctggaaaccgaacaagggctgggtgtcgtggctcacacctgtaatcccagcactttgggaggaagaggcaggtggatcatgaggtccggagttggagaccagcctggcctaaatggcgaaaccctgtctgtactaaaaatacaaaaattagccgggtgtggtggcgcatgcctgtagtcccagctactcaggaggctgaggcaggagaatcccctgaacctgggaggcagaggttgcagtgagccaagattgcacgctgtactccagcctgagcgacagcgtgaaactgtgtctcaaacaaaacaaaacaaaacaaaacaaaaccataaaaaaccaaaaacaaaaaaaaccaacaaggaggcaggactcttactgtgccccaagttgtctagaccttttgggtttcctccaaccctgagatcctgcctcagcttgcttgctacgtgtcctcaacatctgtcacaagtgtcctaagcttctgccctttgagtcacccacaattcctaaatgtaccttgcatctttgtatctgtctgcttttcctgatgtggtccttcctaaggaacagaatattccacttctctagagaagaacaaataccccttggttcttcaagatctggttcatggtagattagattattattcagcaaatattcactgtttctcactacatatccatggaggaatgttcttcctttcatcttgactttgagcttctccatgtgacttactttggccaatgggatgttagtacacatgatgtgagcaaaggcttaaaatgtgcttgcatgttgggcttagtctcttgcatgcctattttttgccatgatgaccaggtagccacaggtacaaggaggccccaaatgcatggaacagacttgagccaaatacatggcctggagtgcagcctgtataagcctagacaaagtcagagtcaatgcatagcaaacctccagtcacctggatgagaaacttacaaatatgtattgttcaacactgaggttgctgcagtgtttgttatgcagcagtagctgccagatgcatagctttcaaggtctcttgccctttattctctgagttctcccccccaaatcccacctatagtacaactgcttaaaagctgttattatactatattatgattatctgattgatgtgcttgtatcccacattagattatgaacttccaagtggacgtaaatgttctgggagaactttgaggagctaaaaaacacctgccttgacacttgtcttacagctaaaaattgtgattattgagcaagttacaccaagatctgtgagcatatattgcagcaagtgaaaaacataatgcttgttttcatgttgtctttgggtaataaagaggggccagtccattcaacctatcttaaatgaggtaaaagaatatgggtgggcaccatggcccacgaattctaccctaggagaggagtaaaagaggcccagacacctcctttctttgaagcagtgaagtgttctaaaaattacaggacatctgaagctgtttagatattttaaaaaaggagaagtctcaaccaacagagactgaaggcggtgtaggtgagtgttcaacgttgcttggtactgtctgggtaaagaacaaatgggtggtggaatgatctttgatcacattctgtctcatagtacttaaaaacttccattttatttttgattttaaaaataccaaatactaaaattgagcccataaaaaggacggagtcgcccatgattctggaaaggctctaaatcgccaaggtgtggtccaaggtcattactaggcttggcacatgtgttgatgaacaaattgagagatacattaatattgaagtttgcagaaaggggattaggtccttaagaaaccacttgatctgcagagatattcagaatgtgaatgtcttcagggaccctggaaaaacacatgaccccattttaaatctgaaattgtatgatctcaaagaagtccagttacatgtatgacattgctgtaaaaagtgtttttccaaatatacctgcaataagtcttaaaaatgtctgtaccctttgacttaacaatgccatatctagggagtacagcagcctgaaggaattaatcagatatgtagatagagatctaaagtaatgttgattacacggttatttataatagcagaaaacagtgaacgtgttagtacaaactatattgagaaacgtgagtttctgtgggcactgccaaatttgctgtgtcatctgtcttcagagacatagaccaatttaatttaaagaggccaggactgggagaagggataggcagagggaaaggaagatgtggtgagagacagaggaaggaagggacaaggagggaggcaggaatggagtcagggagagatggagaaagaaacaaaaacagagacagggacagagactgttgagtggtatgtgatgaatcaatgtctgtgcaataaagattcaaaagggagaaagagtcagagacaagagtggattcaaaggcaggtcccccactccctgttttcgttagaactcaccggccctggagcacccactgttaggacccaggccacacggaggggacagctagcagcagggctgtggagtgggagggcaggcaggagcagggctatcagcacaggctgctgagtcaccagtggtcggggagaagggaggaagtcccaggctatgctggctctgttatgggctgggggagcagggaaggggctcaggtcataggtagggggaaggatgctggatgctgtgttctaagccccgaattatggcattatgggtgtggaattcactttctaattgcattacccaccttccattaactcctgtgtttgctgtgggatcctgttaatggataatcattaggaaatcctgttttagggttatagatgcctttggatagtttcttaggatgatttgagaacttacccctcagtaattatttcaagttgattatttgcatgcataatccagatctcaggggacatattttattcttttcaacctcttggtggattggtgtgtgaggggggtgggagtgggtgggtgtggcatgctcatggtggataatgtccttcggtggctcagagtttctgctgccacggactgagttcagttcggtggctcagagtttctgctgccacggactgagttcagttggaggattgctttgcttttccatcccgctcttctgttctgcactgcagcatcccaagcagccttttcattggatacccttgccccaaacctcacacccacacagtctgtgtgagcagcagccttgctgaaggctcggtgcaacagacagctttcacaccctgcccagcccttctccaccacacactcccagctccctcctctccttaccactccaggttcccttcagaggcccagttctctgccttgaatttaaagaagcagttgaagtctccatcctttcctcacctcggagtctaccttgttacactcacagcatccttaacgtgactgataaacaaagggctacctggtttttcaattttttagtagcaatgaaccagcaaggactctgaaataggaggctgtcttaggttgagtttttggaagcagactctgagaagaggattcctataaaaattatttatttaagaagtgttcctagaaaaaaccagttgggagtgggcgggaaagtgggaccaggagagaaagaaggccaggcaaaggaacggcagcaggcagagtccggggagggctgctttggctcagtctctcctgggaactcagcagacaccttccagttacccccaccagggagcaagagctggaggattgtattcgtatgtttgtcagtcacttgttaagggctgtcccaggggtatgttaatttccaggctcttcaccaagagatgcaggtgcaggctgttgggtgtgaaggcgcatgggaagctggtggacacagtaaatggtccagggatctaaaggggctatgggcgaggcaccaacagtgtctgccgtaagtctttccttcttccctcccttactcaacttcatgagtggaaagacagttgtgtgaacaatttcctcactgatgtgggttctgccactctgtagaaaacaaaagcagcttggtcaggtgaggtggcgcacatctgtaatcccagcactctgtggggctgaggtgggaggattgcttgatgcgaggagttcaagacaagcctgagcaacatagggagagcccatctctacaaaaagtagaaaaaaaaaataaattatcctggtgttgtggtgagcacctgtggtcctagctacttgggaggctgtggcaggaggattgcttgagtccaggaggtggaggctgcattgagctacgatagtgctactgcactccagcctggaaaagagagagacctgtctctaaaaaaaaaaaaaagcaacagctatactggagctggcttgcttactcaggaggacaagagctactccaggcccttctcccattttctgactcctgtctggcatgacttatctctcaggatgactgcagcttgggcatcagaagaaaggggtgagcattcacatcaaatcaggggtccgttcctcagaaattccacgtggagttgctcagctccccttctagatgggggcttctctggttatctctgagaaaatgccccaaccccacgtcacagagccctgggtgcacaggagctaccacactgtcctcattcagaacctgccctatctgccctgagtttgctagatgcaagggagcaggcaacttatcctgtttgagacacagctctcctgtttggggctctctgccccacactggaagcaaggtagcgggtgtagtcattaaccaagtcctgcccttttggggatccctctgactggggatgggaaatctgctgttttcctccttcaggaactcaacctcaggtcctggagtcatgtccaccttgactccgggagtccgagctggggctgctattgtgaactctgctatgctgggctatttctcaatagcactcaagattgcctccctctccttcttccccagccttaactccagtaatgagggaatgatgtgggagaggtttatccagatcttggcaatcaatgcttttccaatagacttttgcttgctctgagctggattctctttccccagttcaacagcaccttccttagctgctttttgtgaaagtgtcactggtcagaacacacatgcagacaattcctcttgacttgccacataactgaatattgactgtgtcaggcagtcggccagtggtatggaggcccctgaaaaccagaggctgctgcagacatcgagtgaggcccacagactgcctgcagtttcttatgcttctcccctcaggtagttgcccaccttctaacatctctgcctcatgggtagcgacattaaaaacatatgcctttatatcttctttctctcaaagcctcaaaatgacagtggagaaatgataacaaataaaaccataaatgtataaggacaaagagttttagagaggatatagaaatagatcatgaatgtcaagaaaattttggaaggtgatcaattaagtcagtggtaatttacttagaagagcagagaaagttaaaatttaaacctaaaaaggggggtggtacccagtgaaaagaagctagaagattttttactgaagtatccctattgaaatatccctgaagatggggatgagtgtgatggaccagttaaaaaggaattatttaggcagatagtaagggtaaggaagtcctcggtaagcttttccttttaatgaaaagcagcctccaaatcattttcttttctaacaaagagcagccagtaaaatcaagctgcagacatagaaaggcaggctagaagcttgcatgggtgaatgctggccattgtggcaataggaaaggggctacctggggaccaggtatgttcaaaatgatgactccatcttcccttttgcttgccaaccacgtgtgcagtcgggagcagacaacatggccccgggcagacaaagactccatttgcataaagaagattagggtggggtggccggcttccccacatgcgatataaacatcacacttggtccaaccaaccttagggccctttctaaatcagacaccgcttcctcaagcctgcctatgaaaccctgtgcactccgccgcaggccagaagttccgcttgggcgcctctctctcttgcagaagagagagctattttcctgtctctttcttttgcctattaaaccttcacttttttttttcttttttgagacggagtcttgctctgtcgcccaggctggagtgcagtgacgccatctctgctcactgcaagctccgcctcccgcccggctaatttttttgtatttttagtagagacgggttttcaccgtgttagccagcatggtctcgatctcctgacctcgtgatctccccgcctcagcctctcaaagtgctgggattacaggcgtgagccactgcgcccggccgctaaaccttcactcttaaactcactccttgtgtgtgtccgtgtcctttatttccttggcatggggcaatgaacctcgggtattaccccagacaatgacaaagcttcaaggggtggggctgaaaaatagaagagacatcttggctatctgtttgaggaagcagtgaggctcccagatgtctaccccatttctacacaagccaggcaactatcccccctatagctggaggggatgggacgttcaaatgaggagatgctggcgtttggggatgtcaggtgcagttgagaacagggaactatactgaaaatgggcactaaatggacacctacctgtggatggcaaaacctccaactcgccttccctgctcagcagccagcatgatggcagagcttatagcctccaggaagaagaatggaagattcctctggggatactgactaggccaagagaaaagacctactaacataggtttctccagtgaaacagctgggtccccacctgatcagcctactgtgaagtccactggcagatgagcctcacccatacacacagaactcgaaattagcattttggtccctttactattatgtctgagtaggtagattagcatcacttgacatcagaggggagctttaacatgaaagacagaggcataaatgaaccaaccacccaaccagccacagtagaggaaaacagactgcagaaagcaaaatgaaatttcaagaaaatcctaaaccttgtaagtctggtatctatgaaaactatgaaatagtaagctatacaaaggaatatatagctgggcatggtggctcatgcctgtaatgccagcactttgggaggccgaggcaggcggatcacctgaggtcaggagtttgcgaccagcctgaccaacatggagaaaccccgtctctactaaaaatacaaaattagccggacggtggcgcatgctggtaatcctagctgcttgggaggctgaggcaggagaatcgcttgaacctgggaagcaaaggttgtggtgagccgaggtcgtgcaactgcactccagcctgggcatcaggagcgagactctgtctcacacacacacaaaaaggaatatccaaagaataaaagctcttgaaaattcaaaataccatctattgggtaatatgctcacaacatgggtgacaggatcatctgtaacccaaaccccagcatcatacaatatacccatgtaataaacctgcatatgaaccccatgaatccaaaataaatgttgaaaaaaaggaaaattcaaaatatgatagcagaaatcttaaaaaatcaacggatgaattaaaatataatttgaggaattctctgagatagtagaagaaaaatataaagaaacagaaaatgaaaagaaagaaaaggtaagaaaattcaaggcttagaccagaagatctaataactaagtttcacaaagaagagagaaaacgagggaaagaaatgatcacatttgtagacaagatagaatttttaaagagggaataacctagtgcctgttgttgggaaaatacataactaaattgtggtatcttcacacagcagactgctacgctgcaataaaaaggtagtgaaccaggtgtataggtaattcttaggaacaatgctgaatgaaaggcaaaccatggaagagtgctctctctgtgcaatgccatttctatgacgttcaaaatcaagcaaaagtaagtgaggtatagattagcaatgcatacatatttagtgaagcaataaaaggaagcaagataattggggaaaaagtcatgagggtgattatgtagctggtagggggcgaggcatggcaggcaagggagaagatggaatgagattaggaaaagtcagtacacaatggttcaaggcattggtcatgttccatctcctaagttgggtgctaggttcttgggaatttgttttactatgtttcataacttaaattacctgtatgttaagtctctctctctctctctcgctctcgctctttctctctctctctctctttcacacacacacacacacacatcccaaataatataataaagtctccctgaattaaggatgtgagttttcagattaaaagggcctaacagtccagtgcaatgagggagaaaatactactccaaagcatatgtgaaatttcagagcatcagagataaagactatcataacagcaggaaaaatagctcacatacaaaaactaagaatcagaattgcgttggtgttctcattagcaagactggaaatggaagacaatagcccttctaagattctgaaggaacaaggttactacctagaattctagactcgacaaagtaatatatgagagagcagaagtaagacacactcagacaagttagacctcaaaaattttatcttccacctaccctttctcaaaatgagaaaatgtactccaccaaaaagagccagtaaatagaggaaatcatggaaaccatggaaacacagattccaatacaggaaagaaacaaaaagaatataaagaatgttagtccaaggaagtccccccaaaactgctggaagtaggcatagagcacaagagatccaggttggagaaaaacaacaagagatctccaggagagatttctccatgaaaaacatgcacgtggtcagtttcctaatatttcagtgtactgagacaagatttacagttttgtgtggcagttttaagaaactaagccccaaacaaacaaacaaagcaagagagaaaagaaaagaaaaaggaggctatttattaagtccgaaagttgtgcaggaaaggatatataaatatatcatgtggctcgatagcatgtaatagttatgtaattctgataatgtgaaatattgactgaaacagaaactataatatatatgggaaaataaaggcaagtggaagtatgtttacaggaatttctaaagtgaaaagaatcaaccaaaatagaagtacaggctatataactctgaaccaaaactagatgagcacaatagaagacaggtaattacagccactttcactcatcagcacagacacaacagttctaaagaaaatgttagcaagctgaatatggcagaatcaagctggtcttactttagtaatgcaaaatcaatccaacttaaaaataatgtattaatataaatcatcacaatatagactaaaggagaaaatctacatgattatcttgataggcacggaacaaatatttgatgaaacttagcagttaagttaaaaacaatcttagccaactagaagtaggaaatttctttaacttgatgaaaaccctctaataatttacatcagatagaatgcataataataaagttttaaaaggattcactttgaaatcgggaagatgacaaaggtgtcctctaatacctttctatccaacattgtatttggagagcctagccagtgaagacaagaaaaagaaataaaactgcgtcacccttaaaagaacctttctgagaacattgggcccacctggataatccagaaacctctctgcaccttaagatccttaatatagtcacatatacaaagtccattttgtcatgtaaagtaccatagtcacagatttgggggattgggacatgaacatttttggggggctgttattttgcctattgcatatgactcacatcacttccatgtaattattcacaggttatatgattgtttacatagagaaagccaagataattgacaaaaaggcttttagaatcaataggagagtttagcaaattgattcaattgttttcaagcagttcagacacagaaaatacaattttaaaaaagatgtcatttataacgtcaagaaagaaaggataaagtaccttgcaataaagctaacaaaagaggtttaaaacctttatgaaaaaattctagaaagtgatgaaaaaatcttaagtataacctattaaataaacagaaaaacatattatgaacgtggacataaaaatgtaatatcataaagatgtcaattctccacaggaatatatagattttattgcagttctctttttattttattttattattttttttgagacagagtctcgctctgtcacccaggccggagtgcagtggcacgatctcggctcaccacaacctcctcctcccaggttcaagtgattctcctgcttcagtctcccgagtagctaggactacaggcgctccaccacgcccagctaattttttgtattttagtagagatggggtttcatcatgtttggccagctggtctcgaactcctgagctcaggcaatctgcccacctcagcctcccaaagtgctaggattacaggtgtgagccactgtgcccagccgactttactgcagttctaatcaacattctaacatttctttggaacttaagctgattctaaaatgtaaatagaaatgtataagaacagataagacacagtgagaagtagaaaatgggtggactcaccctaggatacaacaagacatatcaagtatggtaattaaggcagtatgggcctggcatcatggctcacgcctgtaattccagcactttgggaggctgaggcaggcagctcacctgaggctgggagttcgaaaccagcctgaccaacatggagaaaccccatctctactgaaaatacaaaattagctgggcttggaggcgcatgcctgtaatcccagctactcaggaggctgaggcaggagactcacttgaacccgggaggccaaagttgtggtgagctgagatcgtgccattgcactccagcctgggcaacaagagcgaaacactgtctcaaaaaaaataaataaataaataaaagaaaaaaagaaaaataaaagggtgccattgaaacaaagatatgtaactggaccatcagaacagaatacagagcccaaaaacacacccatagattgatatctgatataaatgacacagcaacattgcaggtaagtggagaaaagataggcttttcaaaaagtgatgagtaattagttactcatatagaaaaaataaaacaaaattggaattctcagaccaaataaaattccaagtggaattcaggaacctagttagaaaacttttagaatgtgggaatatatctacgctcttaggttaaagatttactaaaatacaaaaaacacaactcataaagaaaaaggttgatagttaacatcaatgaaattagaaacacctgagttctgaaaaccatcattaacgtggtgaaaaggtgatgggcatggtggctcatgcctgtaatcccagcagtttgggaggctgaggtgagaggattgcttgaggccaggagttcgagaccagcctgagaaacatagtgagactccatctttacaaaaaaaaaaaaaaaaaaaaaagaagaagaaagaaatatctaactccagattgggggaaaatgtttgcaatatacataattgacaaaggatttgaatccagaacatataaataactcataaatcgataatttaaaaaaaactggaaaatgggtaaaagtcaaacaggtaaatcttagaataagaaaccaaaatggacaataaatatatgaaaagataatctcatgaagaatcagagaagcgcacactaagccacaataaaataccattttaaatccatccaattgggaaaatggaaaagtctgacaatttcagatgttggtagccagatggagcaatgggaactctcatacactgcagaagtaagtgtaaattggcaagagcactttggagactcagcaagcaatatctaaagctcaaggtgcttatgtcctgcaactcagcactaccattcctaacatgtacaagaggagacatttgcaagaaagttcattgtaacattgtttgtaacaataaaaaaagagaaaaatcacccaaatgtccaccaacaggcaaatgggtacatacattgtggtatattcatataatgagacaaaaagaaattaatgaaccaacaaaagaaattaatgtacaacaaaagaaattaatgaaccacagctagatgtgtcattatgaattactgtcaaaaacataatgttaagttaaaaaaacaagtttcagaaagtatttaccatttttataaaacttaaaaacatgaaaagtaatatatattttacaatagagacatatatctattaggctggtgcttttttgtttttcgagataagagtctcgctctgtcacccaggctggagtacagtggtgcgatctcggctcactgcaacctccaccacccgggttcaagcgattctcctgcctcagcctcccgagtagctgggattacaggcatgcaccaccacacccggctaatttttgtatttttagtagaggcggggtttcgctatgttggccaggctggtctcaaactcccgacctcaggcaatctgcctgcctcggccctgcaaagtgttgggactacaggcgtgagccactgcgcctggcccgaaaactgcaattacctttgcagcaacctaatagcaaaagtataaaaatatgtataggaataacaaataccaaattcaggatgtggttcccttttggcaggaaggaatgaactcaaggagggtaacacagagctaaaactgtagatttaatgctttatttcttaagttgggtgatgggtatcattattatttggactatttgtataattatttgtattatgtggaatgacatatgtcactgaagtagcatcatatgcttattcagaaacatagaaggaaaggaagcaggaattgggagttgggaagtgaaagaaaatataggggattcctgtttttttaaatcttgccctcctggttgaccttttaaactatatattgttactacttcaaaatagtcaatatcgtcaaaataatgaaaatttgagccagagagtaatatatgatatgcttctggaagatctccattttttgttattatactttaagttctagggtatatgtgcacatcgtgcaggtttgttacatatgtatacatgtgccatgttggtgtgctgcacccattaactcgtcatttacattaggtatatctcctaatgctatccctcctccctccccccaccccacaacaggccctggtgtgtgatgttccccttcctgtgtccaagggttctcattgttcaattcccacctatgagtgagaacatgcggcgtttggttttttgtccctgcaatagtttgctgagaatgatggtttccagcttcatccgtgtccctacaaaagacatgaactcatccttttttatggctacatagtgttccatggtgtatatgtgccacattttcttaatccagtctatcattgttggacatttgggttggttccaagtctttgctattgtgaatagtgccacaataaacatacgtgtgcatatgtctttatagcagcatgatttacaatcctttgggtatatacccagtaatgggatggctgggtcaaatggtatttctagttctagatccttgaggaatcgccacactgtcttccacaatggttgaaccagtttacagtcccaccaacactgtaaaagtgttcctatttctccacatcctctccagcacctgttgtttcctgactttttaatgattgctattctaactgatgtgagatggtatctcattgtggttttgatttgaatttctctgatggccagtgatgatgaacattttttcatgtgtcttttggctgcataaatgtcttcttttgaaagtgtctgttcatatcctttgcccacttgttgatggggttgtttgtttttttcttgtaaattggtttgagttctttgtagattctggatattagccctttgtcagatgggtagattgcaaaaattttctcccattctgtaggttgcctgttcactgtgatggttgtttcttttgctgtgcagaagctctttagtttaattacttcccatttgtcaattttggcttttgttgccattgcttttggtgttttagacatgaagttcttgcccatgcctatgtcctgcatggtattgcctagattttcttctagggtttttatggttttaggtctaacatttaagtctttaatccttcttgaattaatttttgtataaggtgtaaagaaaggatccagtttcagctttctacatatggctagccagttttcccagcaccatttattaaatagggaatcctttccccatttcttgtttttgtcaggtttgtcaaagatcagatagttgtagatgtgtggtattatttctgagggctctgttctgttccattggtctatatctctgttttggtaccagtaccatgctgttttggttactgtaggcttgtagtatagtttgcagtcaggtagcgtgatgcctccagctttgttcttttggcttaggattgacttggcaatgcggactcttttttggttccatatgaactttaaagtagttttttttccaagtctgtgaggaaagtcattggtagcttgatggggatggcattgaatctataaattaccttgggcagtatggccattttcacaatattgattcttcctacccatgagcatggaatgttcttccatttgtttgtgtcctcttttatttcgttgagcagtggtttgtagttctccttgaagaggtccttcacatcccttgtaagttggattcctaggtattttattctctttgaagcaattgtgaatgggagttcactcatgatttggctctgtttgtctgttattggtgtacaagaatgcttgtgatttttgcacattgattttgtatcctgagactttgctgaagttgcttatcagcttaaggagattttgggctgagatgatggggttttctaaatatacaatcatgtcatctgcaaacagggacaatttgacttccttttttcctaattgaataccctttatttctttctcctgcctgattgccctggccagaacttccaacactatgttgaataggagtggtgagagagggcatccctgtcttgtgccagttttcaaagggaatgcttccagtttttgcccattcagtatgatattggctgtgggtttgtcataaatagctcttagtattttgagatatgtcccatcaatacctaatttattgagagtttttagcatgaagggctgttgaattttgtcaaaggccttttctgcatctattgagataatcatgtggtttttgtctttggttctgtttatatgacggattacgtttattgatttgcgtatgttgaaccagccttgcatcccagggatgaagcccacttgatcacagtggataagctttttgatgtgctgctggattcggtttgccaatattttattgaggatttttgcatcgatgttcatcagggatattggtctaaaattctctttttttgttgtgtctctgccaggctttggtatcacgatgatgctggcctcataaaatgagttagggaagattccctctttttctattgattggaagacagagtcttgctctgttgcccaggctggagtgcagtggcacgatctccgctcactgcaatctccacctcctgggttcacaccattctcctgcctcagcctcccacgtagctgggactacaggcacccaccaccatgcctggctaatttttttgtatttttagtagagacggggtttcactgtgttagccaggatggtcttgatctcctgaccttgttatctgcccacctcggcctctgagtgtgctgggattacaggcgtgagccaccgcgcctggcctggaaaatctccatttttatgactttttcatttttaattttttttaagagacagggtatctgccaggcacagtggctcatgcctgtaattccagcagtttggcaggccgaggcgggtggatagcttaagctcaggagttcgagatcagcctgggcaacatggtgaaaccctgtctctacaaaaaaaatacaaaaattagaccggtgtggtggcaggcacctgtaatcccagtacttgggaggctgaggcaggagaatcacttgaacccaggagatggaggttgcagtgagccgagatcacaccactgaactccagcctgagtgacagagcgagaccctgtctcaaaacaaaacaaaacaaaaagagacagagtcttgctctgacgcccaggctggagtacagtggtgttatcatagctcactgcagcctatactcctggggtcaagagatcctcctgcctcagcctcctgagtagctgagactaggagggtgagccactgtgctgggctaagatctccatttttagatgctttatctcagtgtattcaaaatatggtccttggacaagtgtgggttggtgatctggtctgccatcaactaaatagagaactgagcctaagtgtttgggaacttttactgcaattttagagtgattttatttatgctgaatcaataatttaaaaagtgagacttgtattttgtattctataatttactgtattatcatttttttctagaaacaaactcttatttctcaaaagtattggttgaaacaaattaaaatgaacaaaaaaccaactggttttgcacaagtagtttgagatatattgctctatcttactcaaaattgatgtgtatgtgatttctttttctataatgtgaagttttttttttttgttttcttctttggggatcttgtgatctactcctaaaatattaatgtcatgtgggattccagaattgttttgttttgttccagatatttgccttgcatatataaagaagatgtggccattctttgcatgctgtttccccagagacacatgtaaatggagttgtaatttcctgttggtaaacagcaagtatttaaatttagaatcaggtggtaaggttgatatgtagacgggtaataaattgaattgccttcaaagcgataccttttccagttaactgttaactcaccagtttactgcttttcttttctttcttttttatgcttcatgaatttgtgtgtcatctttgtacaggagccatgtgctaatctctgcactgttccaattttagtgtttgtgctgctaaagcaagcacggcttttcttaatcgtatcaaatattacatggtatgtgaaaacagtatatatctggcttgaggtatttcactgatgacaaatggacctcatgttatagaggaatgaaagatataaattaataaaacatgatcatgataagaataaaaccaaactaaatctcctctccagtgcttggcagcacactcccggagagggttcaggctgtgcgtggccccccagcggtgctcagagatggcttaatggcctcggtgacaacaggagcccagactgcataagattctgcctctgcagatgcagaacagtaggggcctctgatgtgctcaaacatctgttttggatctccatttctcctcaagaagagactactttttaaaaattatttttttgaagctggattacttactgatttccagagtcctcttacacctgccacttctcaagggaatcctttgggcataatcttttaatctttctggaaagctaacaaaacattacctgtgccaggccttccaccaggaacaccccattctttccatcatagtgctttttaaaggactttatcatttgttctctgggttcatttaactcttaacttacaccaatttagcatctttgctgtatttccttgctatttcttatttcattctttacatgttatgttacatttctgtttgagtctttacagtatcttctttcttaccaacttgtctttctagaatattctcacaattaatgttttggtttgttttgaggtaggcgatcagcaggacttgttttctgagcactggtcaggaccctgtctatctaaatggtaggtagcaaagaaactgcccaaagccaggtaggaccagcaattataatgcacttgcataagacacttctatcagtaccatgacagtttacaaatgccatggcaatgacctggaagttatcttatataattctgggaactctcttccctttttccgtaaagtttgtgaataacccaccccttatttagcaaataattaagaatgggtataaatataggtagccagcaatccacaagtgctactccagaccagtctgtctatgggatggccctgctctgtctatgaagcagtcacttggctgtacactgttgctcaaataaacttgctttctttcattgtcagctcactcttgaattccttcctgggtgaagccaaggatcctcctgagctgagccccaatttcgggatttgcctgtatcagcctggtgacccagatgggacaaacaatgggaacaagatgaatgggacaaagtgactcagtacagatcggagttgtggagctgtaacactatgaagctgtaactctagggcagtttgcgctgtagagctgcgcctaaaggactcttttcagagccatcatctttcctggcaactcacaagacaagggaacctgagggaaaccttcacccaaaccccaaataaagacagattagcaccatttgacttccacacacaaaggtcagtcttccctttgttccccctcaatattgacctttttgggtgagccaggaaatgggaactgagtctctggcttggtagctcattgtcccccatcatctgagtgtcccgaatggcagcaggcctggcatgtccttgtcaccctttctcctggaccttcctttttctctttagtggctaatgaccgccattttacttttacacttattttgttgttgcatttgtggtctttcctttagatatttgggcaattgtttctgttcaatgtaaggcaagacactttccgtgtttgtttttaaccccttcttttctaattttgagaggtcccctgttgtcctgactctgggatgcctgactctggtgttgaagccctagactcaagcgatctgcgcgtcctggcctttcaaagtgctaggattacaggtgtgagccactgtgctcagccatgtgcctttttctttgtctgatttgactttacgcaaggagaaatttggttggttttcagaggatccaggaaagtttacggagaaatttgttcagttgatcgtgttctttgacttaacatggcatgacttgcaaatattattgtctacctgctgtactgcagaggagaaacaaaggattctgggtactgctcatgaatatgcaaatggagtggcaactggtaactaaggtcatgccatttatcatgtgaggggagatgcagctctagatctggtccctcagtgggattaccagaggggttcccaagatcttgaacacagaaatcacatggtaacttgtttaacagtaggtatggaaaagtgtgtggttaagctagttaattacaacaaggttagagaagtaactccgaggaaggacaaaaatctcactctatttcaggacagtttggttgaggcaagcaggaaatatgctaagtgtagacccaaactccctggaagggtgagctctcctaggtatgcatttaattacttaatatgcccctggcattatgaggaagttacaaaaggcagaaatgggacctcaaactcccatgagtcaactcttgtacatggccattgggtttacaacaacagggacagagcagaggaagcagagaaaaccaaaataaaaagccaaaaagcccagttgttagtggctgccttaagccacctgctgcctcgaggttattcatcccagggaagtgttgcaagatcggtgtctgggctgcccagacgatagcccccaacttgctggcccctgagccagaatcagtgtgcctaccataagcaagagggccattggaaaagggactgcctcaggctccaaggggaatctgggccactcaaacccataatggccaagacaacagagaactgacgggacctgaggttccccatggctcccactggacaccttaccatctccacagaggagccgtgggtaactcttgatgtggcaggtaagaatactgagttcttattggatatgggagcagccttctcagttctgacccatttctcagggccactgtcttcctactcttgtaccatactggtggtacaagagtaccaccttatacaaggtacatgattgatagccagccaaaaattaggagattcacccatccccttggttgcactgtaggcgatcatatgttttcccacatgttctagcttatgtctcagtgcagtattcctttactgggaagagacttacttttccaattacaggccacagttcaatttggagagccccacaaaaaggcaataggccgggaaggggcactacttctagctctaagtgcttgacttactacaggtaaagaaaagaccttccttccaccgcatattacttctcaagtagactcttctgtctgggacaaagaagttcctgatagagctgttaatgttttacccatgggaaaaacaatatcctttgagacctgaagcaaaagcagggatacagccccagatagaaaagtttctaaagtaaggattattacaaccctgtcagtccccatataatactaccatcctgcctgtaaagaaaccaggtgagaaatacagatttcttcgggatctgaagggagttaatgaggcattagttccagtctacccaatagttcctaacccttatacaatattgacctaagtctctgaacatgctaattgattcacggtatgagacttaaaggatgctttcctttttatacctttgcgcccagactcctagtatattttaacttttgaatggactgatccagatgctcatgctacatctctgtttacctggaatgccttttcccaaagttttagggtcagtcctcatctctttggggatgtattggcaaaataattaagggaactacagttaatgaattgatccctcctaaaatatgtggatgacctataaatttccagccctactagggacgactctgataaaaatataattcaggtccttactttcttgggaaaataagggtatcgggtattctcccacaaggcccagacttctgtgcaaaaggttaaatacctgggatacatgcttattcctggaacaaggacaatagccaggaatgaaaagagaccactctggcactgcagcgccatcagactaagaaacagttaagaacctttttgggaatgggtggattctaccatatctggattccctggtttggggtcatagcaaaaccactctatgaagctctaaaagggaatgatcacgagcctttgaactgggatggaacctgccaacaggcattcctaaccttaaaagaaaatctgggaatggcccatgctttgtgactcccaaacttagaaaaacctttcactctctatgtggctgaaaaacaagggacagctttgggtgttctaactcaaaggctagggaataatcctagaccagggcttatttttctaaaaagctagatcaggtggtggccagatggccaggatgcttgtgagctgtggccaccaccattctattggtagaagaagccaggaagttagccaggcacggtggctcgtgcctgtaatcccaggactttgggaggccaaggcgggtggatcacgaggtcaggagatcgagaccatcctggccaacatggtgaaaccccatctttactaaaatacaaaaaaattagccgggtgtggtggcatgtgcctgtagtcccaggtcccagctactcaggaggctgaggcaggggaattgcttgaacccaggaggcggaggttgcagtgagccaagatcatgccactacactccagactggcaacagagcaagactctgtctcaaaaaaaaaaaaaaaaagccatgaagtcttccttgggacaaaaattagatgtcattactttccctcctcaatcaagtacactaggtcctagagcaaaaggacattaatggctaacagggagtcagttgctcaaatattagatccctctgttccacacccaagagtttacccttaaagtatgtcaggttttaaatcctgctactctgttgctggactcaatgtcccgagaacggaggaaaccatggaacagacctactctagcaggcttgaccttaaagataagtcctttcctaaccctgatgttaaatggtttacacacacacatacacacacacacacacacacacatatatatgcacacacacatactttttttttgagatggattctcactgcgtagcccaagttggagtgcaatggcatgatctcggctcactgcaacctccactccagggctcaagcaatttttgtgccttgaatcagtaaatatattgactcaagtcttttcccaatcagagagccctaattagagtgattaattccacttttttagcagaagtgtgaggaggtaaagctttggcctcaataacttcttgttggcctgccttctttactctctcatgaataaagctactcccatcagtaaaccatttaacatcggggttaggcagggacttacctattctggaatagcaggggctattccggactataaaaagggccaccagggcctgtgaactctgtgcctgtaacaactcaggaagccaccctatacccccacccctactcaagcctgcaatggggaagactggcaaataggtttcacccagatgccaccgtatacagaggactgaagtatttgctagtacttataacaatttcatcaggcggatagaagctttccccacaaggacagaaaaagcactggaagtgtccacattgttattttaaaaaaatcatcccaagttttgaattaccaacatatttgcaaagtgataagagaccttccttcacagctaaggtgacccagcaggtttcctcagccttaggcattatctatcatcttcactcctcctagaggcctcaatccttaggtaaggtagaaaaagacaatcatgttttaaataggacattagcaaaactgtcaggagacctcagagacctgggtatctctcctttccatggcccttttttgcataaggatggctctgaagggaaccttaaaacttagcccatttgaaatggcctatggggggcccttttttaacttcaggcttcctgtttgatgaggagacacacagaatgcttactcatattaacttagaccaggttcaaaaggcccttcaagaatatggaaataaggtatttccctttttcacaaacgaaaaaaaatagctcccctgttcaaccaggagacagagtcctattaaaaacttgggaagaaggatcccacgaggatcaattataaccaaaatggaaggtaccctaccaggcattgttaagcatccccactgctgttaaacttcagggagtcactagatgggtacacttgtccagaattaaacctgtttctcataagtccccacaggcacaagaggaggacactatgcccacaaaatcagtaggaggcagtgacagaggatggacctccatccttctacaacactttacgattaaagaggagtatataatctctgaaagggtaatgaggtagcagatcagcagggcttgttttctgagcactggtcataaccctgctgatcaggacaggatgtagcaaataaaccagcccaaaccagctaggactaggagttttactacattcgcacaaagacactcccacaagtgcatgacactttacaaattccatggcaacatcttgaagttactttatatggttccaggagctccctgccccttttctagaaagtttgtgaataacctgttccttattaagcatataactaagagtgaatataaagatagctagtccatgagtgccactctgcctatgggatagctctgctctgtctacggagcagccattttcctgtacatgttgctcaaataaacttgctttcttttactgttggctcactcttgaattctttcctggttgaagccaagaaccctcccaagctgagccccagtttttgggtttgcctgcatcagttctacatttcattctcatgccattctagtacaaacatgaagtgtaggggtgaggtgggaggcaataaagatagtccttccaaagccttgtatttccaccaggactcttggcagcgaatccctttcctctattggttagcctccttccccacagtgctgcaaccagctggttgtatttagggcttagttgaagtctgaaaccttgattttagtggcaccaacctgtgagcttaggagatgtattcctcccctccagttgcacctagtagacccaaaattagacaactgtattaattcaggatttgaggttgttacagaaggaaataaggcaggagaggattcttaggatctaagttggctaggagaagaaatgaaactaggagaagactaatagaatgcagaagggtcccaggacttaagtttctgagggacagtcatgggtgagcacaaggagtgtgaacaggtagtgaaaaatgtcctcaaagatgaggcaatcaaatgacttgattaatggtttattccctaaggctctaaagcacatggaatggatcattttggctgctgcagaaaccatgggtaagagaacatggtgaggtcctatagagcctaccaacccaagtcaaggagagccacaagtttcagtgtatgcaaatatgaggtcagcgccggtttggggaataggaaagacgcaggggctgtgtcgacttttggaggccagtccagaagtcgagtccaggcgatggtaggagctactccccagacctgagcacctctcctaacagcagctcaggcaaaggccacgtctcggaacagttggctgcacaggtcacgtgacgcgcccctagcccggctctatttggctgcaagagcgctctgtcgcctgcctcggactctgtttcccagaagtcttcctggaaactacatttcgcagggggctttgcggcgcctacttcctcctggctgattagatgggactggtgccgttggccggacgtttttgggagcttcacaggctgatggggaagggcgaaacctgctcgattaaaacaacccgcatttcgaggcgaggaagcgagtcacggctcggcccctccctttgtgaggagaaccaggcccgcctcggggtcccctgggcaatgtagtaacgtgaaggtctccgagtcccgctagcactcccggggcgtgggggtcccaagtgggactggaaccaccgcgaaagaggcggggctgcgcggatcttccacaccagctcctcccttccgtcagggggtgctgcgcatgaacgttttcccatctctacctcttggttatccctcagcagagattcttcttttactctgtacagttttcagcatccctcaagctgatatttcaattaaacaaattttagaattctgagaaatggcgaaataatgtaaaagaaacaaatgatattggccctaaattatcctccagcccctgctgctcatcggacactttatgaggttacaaaggaccatggcgctgcgcatatgggggatccattttacccaccgtacttagatcaggctgtgacttccgccctcgaggagcggctgctgctctaccgggtgtgctcatttagccctagcgttgtttgtgcgtttgaggacattcgctgagccaagctgcaagggtgtcgttatcattttacgaggggaatacggagagcatggtggataaaaggtggttgacctgcccaggctatacagctagaagtgccgttagaacttggtacaggtggaactgattctgatacttgtctcaaactgttaccagtggagggtgttcaggttcttggtgtcttgaacaaataattggacaaaacggcacaaacaaagcaagggaataatgaagtaacaaaagcagagatttattgaaaacgaaagtacatttcacagggtgggagcaggctgagcatgggggctcacgagcgctgttatagaattttctgggggttaaataccctctagaggtttccattggttagttggtgtatgccttatgtaaatgaataggttaaaagttacaaaggcattgtatgccctatgtaaataaagaggatatttcggcggggagttgtggcttacacctgtaatcccagcactttgggaggccaaggcgggcggatcacctgaggtcaggaattcgagaccagcctggtcagcatggtgaaaccccatctctactaaaaataaaaataaaaataaattagctgggcgtggtggcatgcgcctgtaatcccctggtggctgaggcaggagaatcacttgaaccgggcagaggtcacagtgagccgagatcgcgccgttgcactccagcctgggcgacagaacaagactcaaataaataataaataaataaataaaaaggatgtgtcttatcatagctgaagtgtttcatttgatttaattctagcaagtccttaagttccctgcctccaggccatattctgcctcaagacctatcctgtttacttcgtgtagcattagtttctttttcccaggtttgctgctacttacttggttaagccatgatcatctcggctgtactcacagtctcataaatccggtgtttattgagtgttagcaccgtgccaggcagtgtgttgagtgctgggacatggtgttgaacaggggcagacacaaccttaccttcatggtgtttacagcctaatggggaagacagttactgatcacataatacaaataagaataaaatgtcaaattgcgataaatagaacacccccacccccaggatgctacaagagagaataatggaggaaaattgatacattagattgattagggaaagaaagaaatgtttggtctgaaatgcttgaagaaggctgagaagaaggaagctgtgtaacagccaagagaagagtagtccaggcagagggatcagcaagtgcaaaggctctgagcggggaagagcttggtgttttgcaattcaaggaactcagagaagtcccttgtgattggaacacagtgaagtaggggagagtggaacaaattgagactggctttccttttaccagtcttgcctcttcttttcttttcttttttttgagacagagtttcactcttgttgcccaggctggagtgtagtggcacaatcttggctcaccgcaacctccacctcccaggttcaagcgattctcctgcctcagcctcatgagtagctgggattataggcatgcgccaccacgtccggctaattttgtatttttagtagagacggggtttctccatgttggtcaggctggtctcaaactcttgacctcaggtgatccacccgccgggcctcccaaagtgctgggattacaggtgtgagccactgcacccagcctagtcttgcctcttctaaaccatatccacactggcagtataggaatattttcagtactcaaatatgatgacttgactttcctttagaggctttgtgtcccctacaagttttagctcaaactcctcagcacagtgctcagagaccttcgtaattggatttacctcactttccagtcttccttttttgcaagttctgttatctctgcttggcatgccctctcctatgtgcttgctgatcaggcaaacttctattcacactttgtcttggctgaaatatcatcacctctgtgctctccttgtgcactctcaattcacttcttgtccccctgctgtgtaactactggtttgcctaccagtctttcccaagagacagtgagctcctcctcttggggatgtgttttctatctttgtatgatgcagaacacaaggcctggcagttgctcttttctttctttcttttctttttttttttttttgagacggattcttgctctgtcgcccaggctggagtccagtgcaatgtcggctcactgcaacctccgcctcccgggttcaagtgattctcctgcctcagcctcccaagtagctggattacaggcatgcgctaccacgcccagctaattttttgtatttagtagagatggggtttcaccatgttggtcaggctggtctcaaactcctgaactcaggtgacccaaagtgctgggattacagatgtgagccaccacacctggccattgctgttttcataacaaatattcattaagagaatgagtggaacagctagccatgactagcctccacttgtcacctgatgagaaggtgacatgtggttcttatccttggcagagtggaaattagcatccaaaaggacgcaagaagagatgagtaaaaaatctacacttacccatgagccagatactgtctcatccactgtctcatttaatctttgtgacaatcatagttctcagtttttgctgctaagaaaactggtgcccaaaggctctgcctaaagattacccaactagtaatggagaacctcggtaggaaattgggtctttctgatctcaaaggttgagcccctcaatattccttctgttctttttgccccatctggcacccgttactagcacagaagcccggaaagtttaagaaacaacttctgtctctggtgtgtcatttgtacctctgaggacatcaacttggaacagccattgtaccagagttctgtcttttccaggaatcagtgactcatatcagtctctgctgatatcagctgctgaagggcttaggagaactggtaggactcagaggagcagaaaatccaggaaagggcactcttggccagtgctgtttaatagaactctttcagatgagtaaaatgttccatatttgtgctttccagtatgggaatgtctcaagttcctttttagacagtatctccagccccctcattggttcctgacttcaggctgtttccaagacattcaacttgagactacagatccctgggctaggtcttcaagggccctccagatccaagctatgcctcagttttagctgaagttgtgtccaagaacacaggtcagggtacagggagatgggatacgtatagctccagacatggccagtgcattgttgatattgccaccccagcaaactgcctagaacttggcccagagcagatgctaggttaacatggtagatgagtgaatttactttctcttccccagattggggctccctcacctactgccattggcttctggaatccttctctatcattgtgaactgatgacttgccacatggtgaagattaacgaagccagtgctttgaaccaccaccctgacattttgggggtaggtcaggggggtagctacaaaaccagctagtaataattcattgaaaatatgctggatccagcatttttatgtaatgacctcatttttcttgtgaaaccctgtgtgcaaaatgaaagcccaaatgagcatctgctatatacagttaggagtagggtggtgctggggaaagaggactgatctaggagttaccctggacctggggctcataggctgtatgaccttgaacaagatgctcaatgcttctgtgccccagttttctctcaagtaaaataaaaacattggactctaagcttctttctacagttaatgtgaatgtttaaaaaatggctggtcacatctgtgatcaacctacattaagcacctttcaagtgattacttgcttcaattaggtccattttcattgtttacttttactaacagttttttttcttaacccttccacttccagtgccttcctcattcttcactattttttgattgtttcttcagattctgataaatcatcttcatttccagccattgaatcacctgctccttggccctgcctagaggctctttaatcctcagcagtttcaatttcctgacaaagcacacagagggggcccggtctccctcctcttcccttgcccactactcaccactctcccatctaaaacacatctgaaaaatcagggaggtttctattctggcagttgtctctctcaccactagatggcacatgcaggtcatcagtcttttgggcaaaaactaattttattgtgtatttaaactccatctcaatccacaaaagctttgaggggaattacaaaagtacaaaatatacaaaaggataagacaaaaagttgaggtagctggagaaaatagaaaacaagtggaagaaataactccaggatgacattagctcaaaaagatcaacaccagcaaaggcttacacatttggctccgagcttccaaatggccaaagtaaagagggaaatgtgagtggtaataaaattctagattttatgtgagaaaaacaaatatttgggagaagctcaacttttcctgaccctgagaccaaagagatatttttcccgtgggtcagctgactgaacagtgatgcaatacagcggtgacttaattggagctgtttcttataatgtccttttatgcaggcctatggcatgacgctcaagtataattgaggaaaagcagttctactgggcttaaaacatgagtttccaggacagagtaaattcactgtttgttgtgggcctccgtagtttgaaacagtgaaatctgcacacctccctgttccagagtttaggtggagtttgggggagagggggttcttcttggagactgtggtaagcagtttctaagagggccaccaatgatcctgcctcctggttttcaaaccctatctggtcccctcccatgtagcagcagtaatggtctgtgtcaccagcagaatgcaggagaagcagggccgggcatagtggcttatgcctataatcccagcactttgggaggccgaggcaggaggattgcttgagcccaggaattagagaccagcctggacaacaaaatgagacctcgtctctacaaaaaatacaaaaactagccaggcatggtggtgtgagtctgtagtcccagatactacggaggctgaggcgggataattgcttaagcccaggaggttgaggctgcagtgagctgtgttcatgccattgcactccagcctgggtgacagagcaagaccctgtctcgaacaaacaaacaaaaacaaaaacaccccaccaaaaacagaatacaggagaaattatggtatgtcacttctcagatcaggttaaaatacatcatagcttctctcttggtctctctgtctctggttttgtctctctctttctgtcatgctagggaaagccaggtgccatgtcattaggagtcttgagagacccatgtagtagagaactgagcctactgtcaacagccagtgtcaccttattagtcatgtcagagtaccaccttgggagcagatcctccagcctcagtcgagtcttcagagactaaatccctggctaacaccttaatggcaagaaacctcatgagagaccatgagccaggccattcagctaagtcacaccttggctctatgagataataaatgcttgttattttaagctgttaagttttggtataatttgttaagcaacaatagatgactaatacaaaggccaatagaaatccaaggttgcatcaaggataattttacatgggtaagtctacttggtttcagagaccaagagaatatttcagaagcaactcaagtgggcattatttttaacttttagtttaatttaatttaattttttaaaagacaagtcaaatttcacagtggggcgttgcatagcaatcttagtgacactaatgttaataaatttggatgacgtactacccttggaccagcccatgggggcttcaagtctgatagatatgggctcatattcagtctgtgaatgtagaaagacagaggtagagggatccatgtaaaatgtctgcaaaggagatttctctgaagaaggactgtgggggcaaggacttcaacttccttattcatggtgacatcatcggtgcctagcacagaacctggcacgtggtaggctttctacaaatctttcttttctttttctttcttttttttttttttttgagacacagttttgctctgttgcccaggctggagtgcaatcttggctcactgcaacctctgcctcctggattcaagtgattctcctgactcagcctcctgagtagctgggactacaggcacacgccaccacgcctggataatttttgtatctttagtagagacagggtttcaccatgttggccaggatggtcttgatctcctgatctcatgatccacccgccttggcctcccaaagtgctgggattacaggcatgagccaccccgcccggcctacaaatatttctttgatgaatctatgagtggtgagctacaaccttgagtgagctattcatgtatctgggtaaccatcatttattaagctcctaccatgtgccatgtacacgatgttggttaagtcccagggaacttttgtgtcatatacagattcaaatccactttgtgccccccactgcaccttctctcaccctgtgttttctccttgaaactctttattattattactattttttctttttttttttgagacggagtctcactctgttgcccaggctggagtgcagtggtgtgatatcggctcactgcaagctccgcctcctgggctcacgccgttctcctgcctcagcctcccaggtagctgggactacaggcgcccgccaccatgcctggctaattttttgtattttttagtagagatggggtttcaccatggtctcgatctcctgacctcgtgatccgcccgcctcagcctcccaattttttctttttttttgagacagaggctggctctctcacccaggctggagtacaatggcgcgatctcagctcactgcaacctatacttcctgggttcaagtgattctcctgcctcagcctcctgagtagcttggattacaggcacccgccatcatgccaggccaatttttgtattttagtggagacgaggtttcaccatgttggccaggctggttttgaattcctcctgacctcaggtgatccacccgccttggcctcccaaagtgctgggattacaggtgtaagcacccagccgaaactctttattacttgtgtagagattgtgcttttgcttccacactgaacggttctcatggaaatagtgttcttaatcaccatcacaagtaatctggtcgctgtttttccagtatgagaactagagttgctcaggacattgggtttattttgtgcaattttgtcttggggcctgtgctactgctttttttcctctttgtttttgttgaaaagcgacttgaaatgattggtgaactaataccagttcaattgtactgtgatgacaattttttttttttgagacatagtctctctctgtcacccaggctggagtacagtggcacgatctcagctcactgcaacctccacctcccaggctcaagtgatcctccccgctcagcctcccaagtagctgggactgcaggttcatgccatcacacccagctattttttgtattttttgtagagatggggtctccccctgttgcccagactagtcttgaactcctggcttcaagcgatcctcctgctttggccttgattacaggcatatgacaactacctgaatctatattcccctcttcacactgactttggtgctgtggttaaccaaatgttaccgtaatggagatactttgggtgtgaaggagaatcaaacagaatgatttgcctcagaccttgtgtcctccctttcagtaaaacattcctttctccatggttggccctgcactacttccttcttctccctccgcatagctattatttattgcctactccattcccatcaccaagttccacaagtgttatgtgcattactaaatctgggcggggaactgtgaattgccttgccatttttgttagtcagctactttgagagatggacaccaagatgggatgaaacatgcagttgttttacaaggggaaatgcttgtgtgaaaggaaggagggagggagctagagaaggccaggagagccaccagccccaagaaaaggagagagggagagaagcctgggttgttggcattctgaaggaaggagcattctaacaaaggttctgcaaaaccctcagggagtccttgagccaaagtcagctagcaaaggagtctcttgtctgttaggactgggtctgactctgtactcagcactccgtcattggtggggtgcatctccaggggaggcgtggccaatggattttaaagcacagcagctggtgccctcagctccctgcagtgagaagtttgcagaggcacattcttgtgactgagacaccaattttttttttttttttttgagacagaatcttgttctgttaccaaggctggagtgcagtggcatgatatcagctcactgcaacctctgcctcctgggttcaaacgattcttgtgcttcagcctcccaagcagctaggactacaggcgcacaccaccttgccccactaagttttgtatttttagtagagatggggttcctccatgttggccagactggtcttgaactcctgaccttaggagatctacctgcctcggcctcccaaagtgctgggaatacaggcgtgagccactgagcctggctgaaacaccaatatttattttcctcttttttgtttttttttttgtattttttttttttaaataacagaagcctgatttatttggggtggcaaagacctgatattgaatgaaaagatcctagccttctttgcaactaggtgtgggcctgtgtctaagttctgatcaatgcaatataaaccagaagtatcacgaggaccttccagatactccccttaaggggatctggcctgcctgggtggtgaatcccttcttctcttctctttacccagggctatagacaaaatggctgcagcctcagttgccattttgtgtcaagaggcaatgtgttactgatgaaagggcagactaacagcaagacactttcctcccagacctcatacccgctctggattgcttacctctagacttagacctgagagaaaaataaacccccttgtttaagccattgttattttgtttttgttataagcagataattctaatcctatttagtacggtatctattcttcacaacagctctgccaggcaggcacatttatgcccattttatagaaagtgaagcacagaatgattaagtgttagaacctaaattagaccccagggtggcacttaggatagttttagctgtgaataactgaacagagtttctcagtcttctctgaagataataattgcctggggagcttgctaaatatatataacagactgctggccttccccgtggacatgctcgctcagtaggtccaggttaaggccttgggaagctactttatctcaaacaagcagtccaggctctctttatcctcaggaagcccatgtgaatcctaaggtggatgaagaccaagagcaggcagctcacacagtaaggaggtagatactttgccttagaagacttccgtgagcataggaatcatttgcagagcttgatagtatcatttgtggagatttcagattctgggctccagtttttatttttaaaaagtcagtacatctttcatggaacctgggcttttggatttttgtaaagctcccacatgagcctgttgcatgtgattcatagagtccagcttgagggactctggcttaataggagcacaggcattggagtgtgatgaactggggtttgaatcccattgctgcatttatttgctggatgacctgtagcaggctaattaaggcttctgtgtctcaggttttaccatttttgaattgaagaaaaaattataaggcttacctcgcagagttgttgtaaggattaaatgagataatttatgtaaaactcttagctttgcataaatatgctctcaataaatggtggctattgttattatcataccccatgcacacatcttgcaaacagtatgggcacagagttctattactatggaaaatttatacaaatcttcagggaatcacgattcagcgaaggctggtacagggagctgggactcccctttctctccccagcgacctctggccctgagagtgagtgacctgcctgtgcatgcagagattgagtaaagttcttacaggatacactcttatgtcccccagcagccaccttctactctcctttttttctctcttctttcccaaccggtctgtccaagaattaccgtctacactcaatggctcaattttctcatttcccatccccttctccattcactgcagtctgaattctgctgtcactgctttactgaagtgactccaagaggccaccagtggcttccatgttgctaaatccacgggttcttttaaagtcctcatctcgtttgagtcctctgcaacttttgctgctgctgtctgcttattccttcttggaacttttctctcttggcttccaggactccattgctgtttctccttctaaatctgtgatcgctttctttagcttttatggaacctctacctcatccatgtcttctacagctctgttctctatcattttgatccttcatttgctcttagttcctttttttctctgaccagagcccactatcactgaactcttcaaagttcgaggtattaataaattatctgccttcttaggatatcctggtctaatgtgaccttttccttctttcctccatggggcagcttaagacaggcccaaggagtgtgctccagtctccttcacaggtgttcctaggaagctcagcaacacccattaaaacagaacgtggatttcctgtagattaggccccggggagacactgagatacccttgtttccagttatactgctgggggagacagagtcattccatccatccccttagctcaggccttaaggccttgtgtctaggtctttgttctgctgacacccagtgcctttcagaggagttgggcccattcctgacactgacttgatagacattgggccttgcttttacctttgtggttttggctttctcatcaatgaaatgtgaaaattggacgactcaatttcgcattgaataacccattatttttgatttagaagtgactctgaggtcacttttaactctctggcaccatcatgaccagctttttcatcaattgcgcaaccttaataccactcctaggactctcctacggaaatcctctcccaagttcatgaagacgtatgcctacaagaacgttcacttgtatgaacccaattgctcatcaagaggggactggttaaataacttatgaaagtacttgctctggggctgtactgctcaaaatagatagcctgttgtttgttactggtctgctaggagataaagaacttgagccagaatgtaaatcaatgactttatcaagagtctttctgacaaaatatatatatatttacagttgacccttgaacaacatgggtttgaactgcacaagtccattcatatgtggatttatttcaatgaaagttacaccgaatatgcctgcctgtcctacctccctttccccttctccacctcttccacctctgccacctcggaggcagcaagaccaaagtttccttttcttcctcctcctcctcctcagtctactcagtgtgaagatggtgaggatgtagacctttatgacagtccacttccaactaatgaatagcaaatatattttccttattttattattttattttctctagcttagtttcttgtaataatacagtatataatacataaaacatacaacatatgtgtcaatcgactgtttatgttgatcagtaggtttccagtcaacagtaggatattaatagttacattttgggggtagtcaaaagttatggatggattttcgattgcatagggggatgatgcccctaacccctgcgttattcaatggtcatgggtatatatcaacagaaataaacagtgcgcttagagacgtaattgatttgcattctggtgcaagctcctcccttatcttttctcaaaccagtagcaaacagtctctgcactggtaaacagaccaaactttgagtagcattgctaaagtgtaacagaaatgagctacggatgtagagcaaacaatgtctaagatacattgtttgtttgtctcactctgtcttccagtctggagtgctggatcatatagctcaccgcagcctcaaactcctgggctcaagtgattctcccatctcagcttcctgagtagctgggactgcaggcgcataccagcatacctggcaaatttttaatttattttttgggcagagacagggtcttgctatgttgctcaggctggtctcaaattcctggcctcaagtgattcacctgtctcggccttgaaaagtgttgggattacaggtgtgagccacagtatctggccaaaatacactgttaaaagaaaaaagtatgctccagaacagtatggtgttttcaaaagcaatgctctagacaaaaaggggtatataggcacagagatatgttggtagatgcacgaaacatttctggaataagtcctaagaaataaacagtgtttacctctggggagtgcagctgggagtctggggtgagagacctctttctttgttgtatatccaatctgctgtacagtaggtactccccagtacagtatagtggcttggaatctgtcatcctgattagtctgtgccctagttgcaacagtcattaaatattttgaatgtcactccttttactgtttgaacaacaacaacaacaacaacaaaacgcacaaaaaccaaaaaatactacatgcatgcatcactttctttcttttctgttttttttgagacggagtttcgctcttgttgcccaagctggagtgcaatggcgccatctcggctcactgcaacctccatctcccaggttcaaaccattctcctgcctcagcctcccgagtagctgggattacagatgcctgccactgcgccctggtaattttttgtatttttagtagatatggggtttcaccatgttggtcaggctgttcttgaactcctgacctcaggtggtacacctgcctcggcctcccaaagtgctgggattacagacatgagccactatgcccggtcatcacttttgtatttaaaaacaaactagtggctgggtgcagtggctcacgcctataatcccagcactttgggaggccgaggcggtcagatcatgaggtcaggagtttgagaccagcctggccaacatggtgaaaccccgtctctactaaaaatacaaaaaattagctgggtatggtcgcacacacctgtaatcccagctacttgggaggctgaggcaggagaatcacttgaacccgggaggcggaggttgcagtgagctgagatcgcgccattgcactccagccagggcgaccaagcaagactccatcagaaagaaagaaagaaagaaagaaagaaagaaagaaagaaagaaagaaagaaagaaagaaagaaagaaggaaagaaagaaggaaagaaagaaggaaggaaggaaggaaggaaggaaggaaggaaggaaggaaggaaaggaaggaaggaaggaggaaggaaggagggaaggaaggaaggaaggaaggaaggaaggaaggagaaagaaagaaaggaaggaaagaaaagaaagaaagaaagaaggaagaaagaaagaagaaagaaagaaaggaagaaagaaagaaagaaagaaagaaagaaagaaagaaagaaagaaaaactagctatagagagaacactgatctcctagagcccccatttgctgaataacaagcctccttgtttcatttttcacaaacatttcttccctctgttctctccactgggtctatgaacaagggtttgctctctgtcggtgctttggcgttcttctcctgcagatatattcacaagaagtcatcttggttcacagcctcatgatgaagagggctcaggggccagagggctgattatggttctaatttgcaattatacagtgatttttcacactgctcatgaatgctgacttcctccctgtttgggttggagagttagagggatctgatttgattgaagcagtataggctgtgattatcataagaatttggcatagtaaattgaattgggaagtattgggcaacaaatgtaaattatttcctttcatttgtcactcctacacaactgtatatttactgtttgtggctgaccctgtgtagaaaagtgaaatgacttaatcctaatgcctttgaaatgggaactgttgagacacctgagtggtctctttgaattcaagatgcaaacagattgcgctgctgtttggagggagcatggagctgaaacaatatccctggagtctagtagtttttttttttttaagttcaagtgctctaggcccacctactgtggttctagatggatgttttaaatatttgcattttaaaatattttaaaaactcttatttctgtgtaataaaaaagttcggccaggcgcagtggctcatgcccataatcccagcactttgggaggccgaggtgggcagatcaccaaaggtcaggagtttgagaccagcctggtctacttggtgaaaccctgtctctactgaaaatacacaaaaaaaaaaaaaaacaacagctgggtgtggtgatgggtgcctgttatcccagctactggggaggctgaggcaggagaattgcttgaacctgggaggtggaggatgcagtgagctgagatcgtgccactgcacttcagcctggacgaaaaaatgaaaacgttggcttgcctttgtcctgggttcttagaaggtagataacctgtaaataattggaattttctgattgagaagagtgtcttcgtttttcatggtggacctcaatagtttaagctaatgagatgactcaatatgggagcgggccacactaggaagaaccatggtgtgattagagggatggggtttttagccatgtgatatcactcctcagaggaagaggagacggggcatagccaatgattcaatcgattgctcctacaaagtaagaccccaataaaagctctagacactgtaatttaggtgagcttccctgattggcaataccttgtgtattgtcacatattaatgtgcggggagggcaataagccctgactccactaggagaagacaatggaagttttgcatctggaaccctctcagaccttggcctatgtattctccttgtggctggttctgattcatatccttgtgctataataaaactacaattgtaagtacagaactttcctgagttctgtgagtcattctagtgagttatcaaacttgagggggtaacgagcactcccgagtttgtagccagttgatcagatgtgagagtggcctggggacccccaaacttgcagctggtgtctgaagtgaaggcagtcttctggaggattatacccatggcttgtgaagtttggcctaactctggatagttggtcttagaagtcattgcaatttctttaactttttatcttgaaaaatttaaaacttaaagaaaatttgcaagtgtagtacaatgaatacccatatacttttcacttagagtctccaatttgttaatgcattcccatatttgtgtcatttctctttctgtatatacttttttttttcctgaaccaattgaaagttgcaaacatgtcatccctaaacacttcagtacataccttctgagaaccaggacattctcctacataattccaatagcatgatcactcacaagaaatttagcattgatacaataatattatctaatatgtttctattttccctattgtccttaaaataacccttataattttttcctttcaatttaggaggatccagtcaagggtcatgtattcctttggttgttatgtctccttggtttccttaaatcaagattccagaactgtctccttgctttatttgtttttgagacagagtcttgctctgttgcccagataggagtacagtggcacgatcttggctcactgcaacctccacctcccgggttcaagcaattctcctgcctcagcctgcccagtagctgggattacaggcgcctgccactgtgcttagctaatttttgtatttttaatagagacggggtttcaccatgttggccaggctggtctggaactcctgacctttcaggtgatccacccccctcggcctcccagagtgctgggattacaggcgtgagccactgcgcctggcctgtctccttgtttttttgtttttttttgagacagagtctctctctgtcgcccaggctgtagtgcagtggcgcggatctcggctcactgcaagctccgcctcccgggttcatgccattctcctgcctcagcctcccgaatagctgggactacaggcgcccgccaccgcacccagctaattttttgtatttttagtagagacggggtttcactgtgttacccaggatggtctcaatctcctgaccttggattacaggcgtgagccactgcgcccagccttgttttttattttaatttaatttaattttgtctgtaatgaaattgacgcttttgaaagggccacactacctgacttgtatattgtaaattgtaatctcaatttgtctgattgttttctcgtaattagattcagattatatatccttagcaagaatacaaactatgtagatgatgtgttgatgaaaagtttgtactagtgtgatgtcaaccaagatggcagagtagaagatcccttggcatcactcctctcaaaaaaatacaactagaaactattcaagaccagaataccaccctgagttcaccaacacaccaacacttggaggagaagtggagaaaaccctggacgaacagaattgagaaaatctgtgaccggtaagggaagtcatcatttcagactgtgctgtcccctcccctaaccaggcagaatgctacggacagagaatttcccccaatccattgtttcaagagttagaggagggaattgggggtggatgtttgatctctccatggtctgggaatcttcaagggaagtccactctggtcctgtcccatgggaacctttgggagtgctgggagggctgaaccacctgggatgacttagagacaaagagcaggatgccgattgcagcactggcacttggatcttggtggctactctgtgctctgattggtggggatgccatgttgaagagactggctggagtcatagtgctgcaggggcacagtccatggaaaggcccaaatgcctggctggattttccacaatgcccaggtacttgcagaaagcgtttccttggccaggagacaactaaaaggtcaggattaagttccagtacctgcttaagtcttccccatactgagaaactatggcagggtggccatatagttctggggcaacatttagcctcctgtgtttactataagttttccctagaccaagaaacaatgacaaagcaacaatttagctccagtgcagtgttttagttctggtgcttgctgtaagtcctccccagaatgggcagaaacaacaggccagcatttaaattccaatactaagtagtaaaggtctaaaacaagcaaagaacacctgcaaaaactagaagaggtgcctgtttcctcagatatgcaaacatcagtgtaaagatgtaaagactgtgaaaactcaggaaaatatgacatcaccaaaaaaaaccaacaaagttctaacaacaggcccagaagaattgaagatctatgaaatgtgagacagagaattcagaatcctcttaaacaagttaagggaatcataagaaaatacaaatagaaaattaaataaaacttggaaaacagggtgggtgtggtggctcacacctgtaatcccagcactttgggaggccgaggcaggcagatcacaaggtcaggagttcaagaccagcctggccaacatggcgaaaccccgtctctactaaaaatacaaaaattagccaggcgtggtggtgcgcacctgtaatcccagctacttgggaggccgaggcaagagactcacttgaacccaggaggcagaggttgcagtgagctgagatcgtgccactgcactccagcctgggcaacagggtgagactcagtctcaaacaaacaaacaaaaaaacttggaaaacaatcgaggaacaaaattagaaatttgacaaagacataggaataatttaaaaaatcggatagaaattctaggaatacagactagaataactgaactgaaaaacgcattagatagcttcaacagcagacttgatcaaactgaggaaagaattagcaagcttgaaaacaaaatatatgaaattatccaatcagagggtaaaaagaaaggtttggactggaaaagagaaaaagtacatcagcagtgaggtgcaagcatatcacacacggcacatagaagaactgcatgggccaagggccacaacttgtggtggagacagttttacagagcaggaatgttggagttacctgaggctcatttcttattctcctttttctttttcttttttttttcttcagctgtgactccagacatgattcaaagaggaattttgcaatatcatttctgggttttacggaaacttactttacctttctgtgttaggctcttaaagcactgtgtcaaccttaaaaggacacaggaaagggcttgtcacttttctgacaccatctaatcccagctcattccaaggctaagagggttctcacatgtccatctctagcccagcctgcttccctaaacacagtcctgatactcagctacttactttcatctcaaaggtggtctcaaagatccctcatgctaacatgttcagcattcaactcttgagtctctacaccagtccccttccccccagcatgagtctacatccccatgagtctacaccaccacccactcagttatgtgagctagaaacctggacatcatccttgatgccagcttcttttccccctcctcctgtagccagtccatcaccaagtcccgctgttttgaccacctaaataatgatcaaatccattcattctctccatctactctactaccagcttagtccaagccatgattctactacaccctcctagcagatctcttggcttccacacaggcacacttctgaatctcatctccatacagcaaccaaaatatctcttaagagtgtaaatctgatcacctgtccccctacttaggaccctttaatggattcttactgctctttcaaaaaagaaaaaaatcttttctcaggctcctggccactgtccatagcattcaagtataccattcttcctcttgctgtctgcactgctgctacactgtctttctgtttcttaaaccccaaacaattcctctcccttccttcttcccaagacacacacacacacacacacacacacacacacacacacacacacactgattcccttcacgtgtgttcttccttcatgtctttgctcatcagtcccttcactcatggaagccccctcttatacactcttagaatactctattttttactctgagctcttattacagataatatttctacagttgttcaacatttcattcagatctgcctttcctacttccaagctccaaaggacaatgatcacatctgtcttcttcctctgggtagccttatcacgtagcacagtgcctggcactaagtgaactctcaataaatatttgggggtgcatgaatcatctctagaaggcccagtgagaattccaaagggcatgtgcacccatgcaaacattaaggaatttattccgtactctcttataatcttggtaagtttgataaaatattatctattttatctgctcagtctgacttcaaaagtccatgggggaaatttttatttcaaagcacttcctatacttaaacttttgaaaaggaagaacgactagtatttctcccatatttccattctgtcttgagccatctaagctcagaggctggccaaggcagcaaatgaagtgagaggccattgatatgcaaatatgatcattatcactgaaggccacaccccagaacttgatctcagcgctttcacagccaaagccaatttacattaaaaaaattaattttccaaacttgaatttaatttccaaagctaaaatgcatagaaattaaactactaaaacattgcattttcaatagaacacattgctattttttggagtgagagttggctgtcttccaacaattaggttctgtttggcttgtgaaagaggttctgggttgttaaggatggatactcttgaccttggactgacctctgcagtttccctggagcacggacagccaagcagtaaagtagatgctggtggagatattgctactgtttttgagaaatggaagctgagacccagaaagactatgtgatatattgaagactcaaatccaagtcttcagattctaagtactgaggtcctttctcaacattttctcttaaaatgtttggctctttagggcagagcccagactcaccaatgccacacatgcctcccatttgcctgctagactttagagctttggaatggatctgcaatctcatagaaaagaggtaaagcaaattccttccaggtcatagcaagagggtggggtgtcctttaactgtcctgatgcctaaatttggttttacacaaaatccccaagatgctgtaaaatcacttttgtagctggatgccagggtcagaattgatgacttgagaggcagaggagcagagcttctgctatgacctcaggaaaatgagatgtggctgctgaagcccagagcttggctcccagcaaacctcagccctggttgccaatgccatctcccactgctgatggatgatggcccactggctcctgcacctgtggatagctctgatttctgctttcaacctgtagccacgtagcctttggattaaaatattgtcctctgattcagatgattcttttcttctctgcaacagggccaccgtaggacatatatagtagttagcagtgcaggttttgctgttcactagctctctggtctttagcaaatgacatctttttttttttttgagatggagtctcgctctgtctcccaggctggagtgcagtggcaccatctcggctcactgcaagctctacctcctgggttcaagccattctcctgcctcagccttctgagtagctgggactacaggcacccgccaccacgcctggctaattttttttttttttgtatttttagtagagacggggtttcaccgtgttagccaggatggtctcaatctcctgaccttgtgatccgtctgcctcggcctcccaaagtgctgggattacaggcgtgagccaccgctcccagccacaaatgacatctttgatccttggtttccccttctttattaatagactctgtaaagaaggtttcctgtgcgctggttacccactggtctgagtttggtgagacagaacacccatgctcacaacaagttaagtaaacaagcttattacttacagataggcaggcagcaagggacaacagaaaccgaggattcattgccacccagtcctccaaggttcaggaaagctgcctgggtggatggagtctcaactgcatgtgctccactttcatagcagctgagggacctcagaaagcagcccacactgagttttatacctcggggttacaagaccctctgggctaagcctggaaggacatctcatttctagggagggattggaacagagcctggactgtcctgaccagctcccctcttatctcaggatgttttatttccagcatgtcctgcagttattcttgagaactacagataagaaatggggggagaactgtcttggtctaaggccacccagagaactgtgctgcagatcccacatctagagttctcttgagggtcaaatgagatatcataatgggaaatgcttagcttagtacctgatatgtagcattttaaaaaaggtagttattaagttagaaaagggactatctgcaggatccctgcatgggaagaatgcatggggacactgcatgcagatgcttaggaatgctttgtgacaaacaacatcatgggaggtggcagctcaagaaagttgatcatacttgtgcttttgaaaccttgtgagcagtgttaaagcagaaatatgaaagggaaaacctttacatgacagctttctatgttttattgacatcctggctaagctggctccctgacctgggtctggttgattcagagctggtgaacaatcattatcttgcacaaggatgcactaggaaggaccacactctagcccagctggtcatgcagtcatgttgggaagtgctggttggcccagggaagccattcctgatggatcagaggaaaagggaagggagaagtaaatatgaaaagaagctcaagcccaggctatgaccaggagagccaatccttcatttggagcgccactctttctttgcccagaaacctgcaggtacatgcaagtccctgggagtggctccaggaagcccccctcgggctctatgttgctttttttgagttagactctctggcatagactttgtctttgaaagaggatttgtaagtcgctgtttatttattcttttactcattcattccacattcatagagcactggattagtcaggttctccagagaaatagaaccaacagaaatagaaccaaagacatgcattataagaaattgtcttacatgattatggaggctgacgtgtcccaagatctgcagggtgagttggcaagctggaggctcaggagggccaatggtgtagttgtggtctgaaggctagcaagcttgagaccaaaaaaaagctgatgtttaagctctagcataaaggcaggaaaaactcaaagtccagtttgaagactgctgagtaggaataattccctcttatttgggagaggatcagcctttttttctattcaggccttcaactgataggacaaggcccactcacactggggagagccaacctaatttactcagctcattggtttaaatgttaatctcattcaaaaacaccctcacagacacacctggaataatgtttgaccaaatatctgggcaccctatggcccagttaagttgagacataaaattaatcatcacagggaccaacaatgtgtcaggcatattccaagacaccagggacacagcagagaacaaataaacatgagccctgccttcatggagtttaccctttagagggagggtggatcaaaaatcaagtcaatgaataagacttttagtgaaggatgagcattatgatcaagggtggctgtttcattctggtgatcagggaggacttttctgggcaggtgacacttgaatggagacctaattacataaaggagctggccatagaatgtgctgggggtaggggggtgtgttctaggcaggggagtaaccaggcaggactgagcttggtgaatctcaggaacagaaggctggtggggggagcatggttccgggtgggggcagggtaggggtcagtgggggaccagagaaggcagaggacagatcatgcagagcctgtaggctggggaaggaggctgcgtgttattcattcggcctgctgactcaccccagtccttggctaggacagcaaccctgctgaaggaccaggatctaaaagtgtcccttccctcagcaatgatgcccacacttctgtgcctttgcacaagctgttctctctgctgggatgccttccccacgttctctgtccagagattgcccagatatcctttaagacccagcttacattgcaccccctctccaaagcctttccaggattttctgggcagtgagccagcctctcctctgtgcagccatagtcctttgtaaatacactaatgctcacattgattagctgcattgtcattttatagttctgagcctctctcatcctcctctgcttgtcagggccagtgtctaatcctctatctgtccccagcatccagtccatattgaccatatgaatgtgtgctgaaggttctgattgaaccttagggctggctctctccagcttcaatcttccttgccatctcctcctccctccttaaccctccatctgtgttactcatggccaagctggacggggagctctaaaccttgtcggatccactgcaacaagttttgggccttggaaagcctgcattagagctttagaaatagacaaatacacattgtcctgtccagagtcccatttccaaggtggagattcatcaatatttttggccactcagcatctaatccttcttcttcaaaacatctgacttcctctgggaggatcataataaaatcccattataactcttttatgttccggggctgttctaaaagcttcacatttgttaactcagttagtcctcataatagccctattagctgagggctattattatccctatgcaaaaggggcatagggaggtcaagtaatttacccagggtcacacagtagtgacaagcagtctagtgacaagcagtctagcccaatccttgctctttaccatgactttactgccatggtgtgcagacttgatttgctctcccactgcaggatctaagggtcctaccatttcttcagtcaaatccttcctctcatatcctagtagagccagagggtgggcagatggcctaaattagtcaagatgactcttccaggacttgaagttgaaaggatgtaaagtgtgaagatgcagcagctgtcttggaaccatgagggtcacatttggttgagaaggcagctgagagcagaaggtgaatagagatgagtggagaggcagtgagaagtggactctagctgtattagttttctattgttgttgtaacaaattaccataaacttagcagctttaaaccacacaaatgtattatcttacagttctggagatcagaagtctgaaatgtattttactaggtgaaagccaaggtgttggcaggtgcctttgtgtgtttgggcagctatcttagtctgggcaatttataaacaacataaatcattactcatacttctggaggctgagaagtccaagatgctggcagatttggtgtctgatgaggggcctgctccctgcttcaaagatagtaccctctggctgtgccctcacatggtggaagggacaaacaaattcctttaggcctcttatataaggaccctatcccctaaaaccatcaccttgggggttaggatttcaacatatgaatttgggtggacacacatattcagacatagcagcagagctctgtttcttcaggagtctctaggggagaatgtgttttcttgacattttcagcatctggagttccattccttgggtcttggcttcttcttccatcttcaaaacatagcatcttcaaatctctctctgcttctattgtcacgtgaccttctctgactctgactccttctctgtccttcttataaggaccatcgtgattacatcgggcctgcccagatgtccagcataacctctctatcttgcgatccttcacttaatctcctctgcaaagtcccttttgccctatcaggtaacaatcacaggttccagggattaggacatggacattttggggactgttattcagcctgccacactgacatcttccctgctcagccacgccaggctggcagggtggcccccatggggaagaagtgtttttttcaggattccttgcttgtgccagtcccaggaggcagaacatacagtagcagcgatggcagtcaccttccactacaaactctggagttgcaactgtggttcaaggacagatatttctctgagaaccatctccttgggcacagcagcagaattccatctgctgcagagagcttaccacattcccagaacctctagctgagcctcatatcttttctgagaggcagcctgggctgtgtttactcatggatgtatccaggtggaattgttacttccagagaagatcaaaaataggagcttggtcttcagattttcctgtttctcactgtccttggagaaagagaaatcaaggaggttggagacaggccttccaaaggagctagagggaggggccctggaaatgtcatgctgggcaaaagacataaatattccttttttttttttttttgagaccgagtcttgctctgtcgcccaggctggagtgcagtggcgtgatctcagctcactgcaagctccgcctcccgggttcacaccattcttctacctcagcctcccgagtagctgggactacaggcacccaccaccacgcccgactaattttttgtatttttagtagagacagggtttcaccatgttagccagaatggtctcgatctcatgaccctcatgaccttgtgatctgccctccttgtcctcccaaagtgctgggattacaggcgtgagccactgcacggagcataaatattcttttattaaagtaacactatcaataacaataatatttaatatgcttgaaattaaaattaaatttgaaaatattttaatttaataaatattaaaatttaaaaatgtattgtcactgagtggtaagcacttaatttacattattatttattttattaaaaataattggccaggtgcggtggctcacacctgtaatcctagacctttgggaagctgagggaggtggatcacctgaagccaggagtttgagaccagcctggccaacatggtgaaaccccgtctctactaaaaagttatatatatatatatatatatatatatataaaactgtatatatgtgtgtatatatatataaaactgtatatatatgtgtatatatatatatatatatatatatatatatatatatatatatacagaaattagccaggtgtggttgtggccatctgtaatcccagctacttgggaggctgaggcaggagaattgcttgaacccaggggatgaaggttgcagtgagccaagatcgcaccacttcactccagcctaggccaaagaacaaaacttcatctcaaaaaataaaataaaataaaataaaatatgtataagaagatatgctataaaaatataagctctcttcttaccccagtctgtttctctcctcagaaacattgtttcttgcacattcttctagaatttaaaaaatccatgagcaatcatatatgagactgctctttaaataaaaacaaatggctacattttatacatctcatgctgtttcttgttttttttttttacagggaaggatatatcttggcaagttttttcattttatcctaaatagatctactttatttttttaaagtgacatgtttttttgttttgtagatgtgccataatttattaaaacaccttccttttgagggatatttaggttgttcccagtcttttgctcttatagaaaacccagaaataaaaatcctccctgtattccgttgcatacaggtataagttcgtaagtagaataaattcctgtgagtaaaattcctaggtcttctctctttagtcataattatcctatgaagcaggtattattattattttcacttagatggggaaatagcaatactgacaggctaaggtaacttgcctaatgaattattggttgagattggattaaagcatactgagaacctcagtcttctaggggctctagacttcttgatattagaaagagttctaatttttttgctcaggaccaaatgggaacctgtgtcctagttgtgtgaatcaggatagggtaggttatgctgctgtacaaatcaatcctcaaagctggtgtttgaacaagatgaaagtttatttcttgcttctgaaatgtctgatggagcctctgggtgctctccttcctctggtgattcagccattcaggctctctgagatacctgcatctcaacacatgattatttgacatccctgcagcagggaaagaaagaaagagggccctagaaggtataccagctcttacctacatgggctagaagtgatgcagtttatatctgctcacattccattgtgataggaacccaatatctggattcagggttgggggaaagaggagccaccacttaattcccaagagtcactgcttcacatcttcattaatagaaatttattttactgatggatatcattggttttctacccaacagcctttctttgattcttctctgctaagagaatcttgattctgctccagaagaaatgtgccccgcttcagtcctcttaccttttgatagtgattggtctagaagtcgacatgtgactcagctttggtgaatagaggaaagggatgtccgctggggcttctgggaaactttacttcctaataagatagagcagccatttagttgcaagtctccttccttcctgctttgtgcattaacttgcaaagatgttgaggcagccatcttgatatcctgagagcagacatgaggatgagtggaaagagccccaggagtgctttgatgactcttgaagacattgttgagttacccctcccccaacatatatctgaacttcttaagtaaacaatacacattcttatggtttaagcagtttttagtgacgttttctgttacttgcagctgaaaacattcccaactggtacaatgctgtgccctttgctcgatgctggggaatggagctgaattgtgtatatctcctgccctcaaggagctcacagtccagtggagaagcacctcatgggagcaatatttgggcttgaatgaaatgtgctgatagtgttgagccgggaagaagtagtggtgtggaagggtcgggtgcctggtgagtggtcccacacgtccttctgtcctgtcattcttagtcccacaggactctcaggacatgagccttgattgccaggaagtgggcagctttctgtctttgaaggcaggggctcacttttcagagaagcgttcctgttacaccagggctacaaattaacacattattttaggccatttctggaccataattttatcctccccttagcgatttactgcatgcaaattttccactctatgcaaatcactcactttacggaaatcatctatcatatgttcccaagccctagcacctgcaccaggaagaattggatgattcagtccttggagcattaaagtgcaaacacttaactcaaagaatctcttgggggatagttgagcgttggatgccaagatcagcagcctctgcagatagcctgcttagcttacagggtgtgctgaactctgctgcctcccctcacccctcttccctagctacttacaagccccttccaggtggtaatgactatttggagtaaatattttgatgtgacagaatgattaagtccagactggctcggcaaagaaccttaaggcaattaggtttcccaatcagtgtaggtgggtacatctgtgtgcctggctgagctcagacaggtgctgtaagaagcttgtttctctaataggcttcctcggggaagcagtggctgcttaaccttggatacacattggaatcacctgaggagctttaaaaactatccaggcccggtctcgctctcccatattctgattcaattgatgtggcaactcaggtgtggggagtttaaaataatcttgccaggtgattcaaaggtgtaggcaaggttgagatgcacgggcctggacaggaaggcggaggtctctgcatggctctggctctgccgatgaccctctgcatgacactgggcaaatccagatactctgccctctctgggcctctactgtagagctgtccagcactgggtcttccctgcagcgtcacaaccagagtcaacacttggcatgggtgctgggtgagtgcttgattaattaaactaaaacaataacttagtagcggtttttttttgttgttgttttttggagatggagtctcgctctgttgcccaggctgaagtgcagtggcatgatctcggctcactgcaacctccgcctcctgggttcaagcgattctccggcctcagcctcctgagtagctgggactacaggtacacgccgccatgcctggatatttgattttgtatttttagtagagatggggtttcaccgtcttgcccaggctggttttgaactcctcatctcaggcaatccgcccaccttggcctctcagagtgctaggattataggcgtgagccaccgcggccggcctagtagtaggttttaagaatagctttattgaggtgtaattgacatacaataaactgcattgattgattgagggtcttgctatgttgctcaggtacctcagcctcccagatagctgggactataggcacataccaccatgctcagctaattttaatttttttttttttttttttaagagatgggggtcttgctatatttcccaggctggtcttgaactcctggcctcaagtgatcctcctgccatggtctcccaaagtgctgggattacaggcatgagccactgcaccttgcccctgcccatacttaagttgtacaatttgatgaattttgatgtatgtatacaaatataaaaccattaccacaatgcaggtgttgatatctgttagtttgcgagggctgccataacaaagtaccacatactgggtggcttaaacaacagaaatttattttctcatagttttttttttttttttttttttttttgagatggagtcttgctccgtcgcccaggctggagtgcagtggcgcaatctcagctcactgcaacctccacctcctgggttcaagcgattctcctgtctcagcctccaaagtagctgggattataggcatgcaccaccatgctcggctaaattttgtatttttagtagagatggggtttcaccatgttggcaggctggtctggaactcttgacctcaggtgatctgcccacctctgcctcccaaggtgctgggattacaggcaggagccaccatgcccgaccatgttttctcatagtttttaaaggctgggaagtctaagatcaaggtgtcagcaggtttggtttcttctgaggcctctccccaggactatcttctccctgtgtccccacatggtcttctctgtgtctatacaggatttgggcccaccccagtgacctcatttttacttaatcacctcttgaaaaatcctgtctccaaatgcaatcacattctgaagtactaggggctgggacttaacatatacattttggcggggttgggggtgggacacagctcagcccataacaatctatcgcttccaaaatttcctggggactctttgtaatccatccttccctccccactccacccccatctctgagcagccactgatttattttctgtcacaagagattagtttgcatttttcttggaattttataaaaatggaatcacacagcatatattcttcttttgtctgacttttttttttcccactcagcgtaattgttttgcgagtcacccacgccgtgggtatcaatagtttgtttctttttgcggctgagcagcattccattgtatggatgtaccacagtttgtttctcactcacctgttgatggacattggggttgtctccaatttttggctattgtgaataaaactgtatgaacattcgtggacattttttaggtatataaggcacatttccacatattgtctcctaattctcgccacaatgctgcaaggcaggcaatctgattctcagactatggatgggcgaactggagcaagacgtggctgtcatgccacataggaaaggattgggtttgtttattgcacatctccagtggccagacagcacgatcttaatagatgtttttcccttgagtgaatgaataaatgagagtgaaggatttgcccaaggttgcccagtggggtctagaaggttggtagcctttctctgtgcacagaacttgtatttagctctgagaaaacagcatcatctctgcaacttcttccagaatgggagccacagcacctgcagttgctttgggtgtgatcaggggtggggtgggacctgccattcaaagcagccttgaggccgaatctcacaggttgatactgttgaatagttcaactgaaaaccgagggaacagaagcctggctgtgctcagatggactctggtcagaacatggcgagggggctttattattctgaaccccagaataggtgagtgatggccagtcaggactgaaacccaagctcctaactcccagctcagaccttggtctcctcaccttctttgactgctgatgcccttctgagcctccaagaactgtgagatgcaagcaggttgtggtgtgtgtgttgctctgcaaaccataacctcctgagcaggcaggggagttgttatgataccttaggtttgggtatttgtgaccacacgattgagctatgattcaagaaacaaaaggaaatcttcacacagaaaaactttcccaggacactgctgacaactgagtccctcttctgctctccctacgccagctggtggccccagcatacagccttatattattggcctcttctgtgggcaccatgcagtaaagaatctagaaacttctctgtacaacttctaatttaatcccttcaacccctatgggagttagcattggtctaattttattgacaatgaaactctggctcaggaaagaaaaggagctcgcccaaagtctcccagctagagagtagcaaagatgcctctggaagccaggattcctgtgtccagctgtacagctgtacagtcagtcctaggacactatttatttttcctaggactttacatgctgttacagccaactcactcctggtcccaaattggggaccctgtgtagtcttccctatcaaacaaatagctggtttctcaggctatttctccgaccctcagcaggcagaagagctggggctctccctcccatccccagggccgtgtaggaggcacagcaccacccgaggggcccagccaagtagacaagaagaaacttcacaacccatgcttgacaacaggagagccacctgccagaggaaggggccttggcacctagtggtcttgttattgggtggggccgctgagtggtagaaattaacaaacagcaattgaggatgggtttggaaactcacaaaccagagagttccaatccaggctctgctgttttgtgtgaccctagagcaccattgttgggcttctgaggctgtgctgcaagcagatgtggccaggctagggccccaggagaagccatcagacagggagcctcagattggactggccctgtcccacaggcaagactgccctgctttgtccaggttggacaccaaaggccaaagttacctagaggagcatgagagttttgtgaggatgggtgtcccaggctgtgttccacacagctgttctggcaccaaaccctctggggtctgcacaggctggaatcctgcccctgctaccgtgtccagaattggttccttccggtgggttcttgatcgccctgacattaagaatgaagccacggcccctcgtggtgagtgttacagttcttaaagatggtgtgtccggagtttgttccttcagatgttcaaatgtgtctggagagtattccttctggtgagatcgtggtcttgcatgacttcaggagtgaagccgcagaccttcacagtgagtgttacagctcttaaaggtggcacttctggagtgtgttcctcctggtgggttcgtggtctcactgacttcagaagtgaagctgcagaccttcacagtgagtgtcctggctcataaaggtagtgtggacccagagtgagcagcagcaagatttattgtgaagagcgaaagaacaaagcttccacagtgtggaagaggaccccagcaggttgttgctgctggctcctgtggccagcttttattcccttatttgaccccacccacatcctgctgattggtccattttacagagtgttgattggtgcgtttttacacagtgctgattggtccatttacaatcctttagctagacacagagcgctgattggtgcgtttttacagagtactgattggtgcgtttataaacctttacacatagagtgctgattggtgcgtttttacagagtgctgattggtgcatttacaatcctctagctagacagaaaagttctccaagtccctgctgggcccaggaagtccagctggcttgacctctcactacctctccaaacaagtctcctgccagctccagtgtctgtgcaggttgtgggatctcctgaagctgggatccctgagctatgtggcaagagcatgccattcctcacctgttcaactcattcctttcccaggatctactggggaccaggagtgagtcctgatgcttggcaaccctgtgcagtttttccagcttcctccccatttagccgaggttctgcaacctccttctgtccactctgaatgcttcccctctggagacttgcttggagtgtgccagtgttccccatgtcctggtctcttggtgggagatgttgttcctggctgtgtctagttggccatgttggctcacctgaatattgactttggacttttgagttgatgctggaataaattaagactttgaggactattgggatagaataaatatattttgcatgtgaggacgacatgaattttggaggctaggggcagaatgctatggtttgattgtgtcctccaaagtttatgttttggaaactgaatcctcaatgcagcagtgttgggaggggggcgcctaatgagaggtgattagatcataagggccctgccctcatgaatgtattaataccattatagtggacatgggttcctgataaaggatgagtttggcccccttcccctcttactctctcactcttgacctctcttgcccttctgcttcccataagatgacacagcacaagggcccttggcagatgccagcaacttgatattgaacttttcagcctccagatctgtgagaagtaaatttattttctttataaattacccagtctgtggtattctgctacagcaacacaaaatagtttgtcaccaaatagtaaacgggacacaaaggacataatcacaaagaagtcaaaatggggacattattgatttaattctttagtgttaaaaaatcaagcttttaaaagagcctttcaatcaagcatattgtgcagttccaaaaacccccgcagggtgagcacagcgcctgctgttccattccgcattacagatctgccgtctgctcgtgtgttcctaggacagtgttgcatgaggagctcagtaaatccctaggtgggcatcagaacacccccaatgggccccacaattctttcttatttggagtgtggcacgtgagctctttgcgactgttcctgtaccccagtcaccaacaaaggccttcacgtggctgatctaaaacatattggatcaaggatgaatggaaggtcctggagccagaggggaattttccttgtcttccagaatgactggggttgctggacttcctgagcccagggactgactggcagggtttgctgacagttggcatgctctatgaagagtagaaaggataattcctctaagccagcctgtgttggggctgtatagagaacagctgctctcaatccatgcctcttatggggtaccttcagcctgtagtcctctgactgatcctctgatcttgttttaggtgccctctgtcccctacattctcattttggctccacatccagttcccatcccaaacctcagttactcactttgatgcttggcttgatctcacccagcttttctccaggatatgacttctagcctctgtactggctacatataccacttctaccagaagctccctcctccccagcacataggatccaggagtcaggacctctttagctagggaagctagttggttttgacttaggtcctgattctagcatttattatttatgtgcacataggcctgctactttgtcttcctgagtttcagtgaaaggaggggaaggccatccctgatggtcacatatggacactgttgagtaagagccagagtcccagacctcagaccccaaagccaacacaggctccagttcccttgatgaagatatttctttccatctcaattgggaatgtctttctcttccaccccatttctttttcaggtaaggatgggccattttcagagctggctttcagtaatgatgacctttctagctgtgtgaccttaggcaagtctcatgtttactgtctatatttcagtttcgtcatctataatatgagaaatacaaaggaacctatctcaggctgtgtaaggtaatacactcacaggttctggggattaggatgtagatatcttcaaggaagtcatgattctgtctacttcaaggcctatctgagcttgctaagttatgtggttccttaaggcctgtggccttctttcattctccatgtctctgccattctctcccatcagctgggtgcctgacagttgacttgtctcaacaaatcttacttgtatctgcttgagtggatagaggtcctttggtatccggcatcttcccaaatggcccaggtgccaggatggcagatctttaaatgatattctttatgggcccagaaaacatatgtattcctctgattagatttggaggccagcccctgtcccttctgagctttgctttctctgctagaagtggctttcattttagatgcttaccagaggctttcgcattgtcagataactgggaatcactatttggatgtcatggtgtacatgtgcagttaggaaccggtacaaccatttgcccctgtgaaagcagcagccccaggataaagccaacatacagagctgggcacaacctaggggatatggagaaatggagcttgcgccctagatcaagctgatcttgaagcccacattaccttccttttacatgagccagtacatttttcttattagttaggccaacttgagttgtgtatgcagctgttatgtatagctgaaagcattacaaatgataaaatgtgaaggagcttgtatatttcctcatggcttcaccatgtgaagattggggattcacgacatgtatttatctcctccccctcctgagacctaactatagaaatgaaaaaggaagaaagtcatgatgatgcagagaatgggaaaagatcattagtgagtaagatagttttttttttttttttaattatactttaagttctagggtatgtgtgcacaatgtgtaggtttgttacataggtatacatgtgccacgttggtttactgcacccattaactcatcatttacattaggtatttctcctaatgctatccctccccctgtccccaatcccatgacaggccccagggtgtgatcttccctgccctgtgtccaagtgttctcattgttcaattcccacctatgaatgagaacatgtggtatttggttttctgtccttgtgatagtttgctcagaataatggtttccagctgcatccatgtccctacaaaggatatgaactcatcttttttatggctgcatagtattccgtggtgtatatgtgccacattttcttaatccagtctctcattgatggacatttgggttggttccaagtctttgctatcgtgaatagtgccgtaataaacatacatgtgcatgtgtctttatagcagcatgatttataatcctttgggtatacacccagtaatgggatccctgggtcaaatgatatttcttagttctagatccttgaggaatcgccacactgtcttccacaatggttgaactagcttacactctagtgaatatgatatttcaagaaagttctggaagaagtaaaggacatggcagatggcacctgaagaagtcactgcttaagtgcataagttctgaagacaccaggtacagtagtgtaagatggagatgcaaggctgaaaatgggcattgtgtgtgtgtgtgtatgtgtgtggcatacacacacaaatatatacacatatatacacattctttccccctaattcagaaaaatcaagcaaagaaatagagggttcttgtaaaattgactggtctcagtgaagtgtcccaaatgtctggcatctggggtaggcagacttatgcattgaacacagtgcctagagccccaattcactcagggcttcccaaaatgttttaattattttaaactcagaaaaaatgagtataataataatgaatatgtaataataaaattgacctggagtatttcatctttataccaactcagtcataaaatataatttaaaataatatttttctcaaggaaggagtacagagagttaaaagtgcctgaggcccagaaacatcataatgtggccctgatctgggaccccctagtatgaggatcactttccaacccatcaccccaaagtgcagcccaccagtcacaagccctatctgtgttcagagagcccaatcagatttttagaaccttgccattaaaaatgaggtgagagcatatcccaatctgtgactgactcgatttgaatagcagttaaaggtgggtgaggctatattaaaagctctaggacccaatcactgcaggattccccttggtgtgtgaaacggactacaaagccaaggtcccattgactactagagaggttgtcaggttagtgcaggtaacctgagtcagaaataactcacatgttcatgcaatagacattcactggactgggcccagcgttgagtaagagatgggtcctgtcttcaggtgtgcccagtcttcttaggggtccaaagacctaaccttataagactgtgtcatcagtgccccaagacaggtgtgtgcctggtgtcatggggctcagatgggggatttgggaaagattcacacatgaggaaatatttgagttgagttttaaaaattgaaacattttgacagatgacaggggtgggaaactttcaggcagaaggaacagtgtgaatggatgctcagaggtgcggaaggccattgtgtgttgaaggaaagacatacggctgaccaaggctgaagtgactatatagtgtaatggccaagtgcatggactgtaattcttccctacctgggttcaaactccagtcctgctatttcttaactgtgtgaatttggcacatttcttaaatcgattttttagctttcccatatgtaaagtggagagaatcataatagtactgttgaagcaaactaaatatggtctgagaaggactccgtgcttctctatttgagtccttgtggatgaactgtagcctagcttagtcagacaagattgagaacctaacttaggagcatgtgcctgtaacaataactgagtcttggccaatcccagggccgtgcttcaaccactcagagggctaagttttcaaactgtgttcaaatgaggcaaacgccaacctggaacccatccagctgtttctgtgcctcactgccgatttctgtacgtcatttcccttttttttgtctataaatcttcttccaccatgtggctgcactggagtctctgtgaatctgctgtgaatctgggggctgcctgatttgcgaatcatttgttgctcagtgaagttcctttaaatttaatttggctgaaggttttcttttatcagtacctacctcaaaggactgttttcaggattatatcctggaataaagtaaatgctctatatgttacctattattgttacccccacccgtttggattgtggaagtttcttctgtctccctgatgggctgtgagctcctcggtggtaggagccacaccttcctcacctctgcctcttccatgggacctaaggccatgtaagtgcttgctaaaggcagattgaattaaatgggcctctgaaagggtgacatatataagcaattatgatttatttttcttctaaagaaggaaatagaaagttcctttcctctgctggtgatgacaaatttgcattgcttaaaaatgctgattggaggaaggcaggccacatttatgggatgtccacagtgtccacatccccagcttcatttactccttcctacaaccagtggagcaaggtttacatacccatttaatagaggggaaaactggggcccacggtcactgagataagtgtgatacagtcagaattcaaacaccttctggcttctagaactctgagaaataaatctttcttgtttataaatcacgaagtctatggtacttggtactttttttttttcttttttgagatgtagtctcactctgttgcccaggctggagtgcagtggcatgatcttggctcatttcagcctccaccttccaggttcaagcgattctcctgcctcagcttcccgtgtagctgggactacaggtgtgtgccaccacacccgactaatttttgtatttttagtagagacgggttttcaccatgttggccaggatggtcttgaactcctgacctgaggtgatctgcctgctttggcctcctaaagtgctgggattacaggcgtgaaccaccacacctggcctatggtactttgttatatcatcctgaactaagactccttccctggaaatttgctcaagctcttgggaatggagggctaaaggaaagagcctggccactcatttgggaggggaaaaatagttgctaacacagacggagggagagacatccctatcccattgaaggtggctgtcctgtgggaagcctgcaattgctgactgtgaccactagatggaagcatggagaacagtgccggttacagtctgggtggaatttgacctgtgctccccaagcaggagctgtgcctgggcttccatggatgctccagagaaaaagccccaagctggcctggcctcgcagcgtgtgggctgctgcatggaacaggagtagtcagttggtcctatgttcccagctcagggactggcctcaagattcactgggctgaatgctggggttccattacccttttggatttcatggctcctggcttccctctgctcactgtcgccaccactgggctcagtccatccatggggaacatctattagtggagaagggccaagtaatttatttttttggatatgtgtgtccacactgcttggaaacaaaattgtagcttcctgtactggccagattctctgtccttggccctccacagtggctcgtccctggtcagggtcccaagcggccacccccgatcacctagagtttggcaactcttggaagactagagcaatggtctggtcttgataatttcatcacataaaagggcagggaacacattgcaacaaagttcactccctgcttcattcccagaataatgtgtctgtaaatgaattagaagtggatttgacacgtattttcaatgaaaaggtcaaagacattacaactgaaaacactcctctctgtgtagacaggcctgctagtgtgtcacaaggctctcaaggagagagggggaaagactaatgcccatgggccatgcaggtggcaggggcttcgtctactgtctctctgtgaagtggacattctaattattatttctaccttacagtggaaagtgtggctcagagagtgtatttgttatctattgctgtataacaaattacttcaaaacttagtcgcttgaaataataagcatgtagtttctgagtgtcaggaatctgggagtggcctagctgggtggtgctaattttaggtatctcgaggttgcactcaagatgttggtttgggctgcagtcatctgaaggcttgactggggctggatactctgctttcaagatgacacactcacatggctgttggaaggaggcctcagttctgcatcatgcagtactggtgaggcctccacaggaggcctgagtgtcagtttagcatggcggttggcttttacaagggctagtgatccaagggagaaggcgaagacacatgcctttttatgaactagcctcagaaactacacatcatcacttctgtcatattctattggtcgtgcagaccaaccatgatgcagggtgggatgggactccagaagggtgtgcagattggtagacaaggatctttgggggctatcctggagaccggctgctaccagagagcttaagtaacttggctatcaaatagactgaaattcacttaaagttcccactgttcttttgtagtaggggcagaggccttggagagacattcggataggtgaaagaatcaagaactcatgctttgcccactctactgaaaaaattaaaaaatgctgataatactatttctcaggatatggggaaatggacactttcattcactgttcaaaatttaaatttttctttattttgactctaccactcttcctttaagactctatcctatagaaatatctacattcgcacatatatgcaacatatatacatatataacttttttaaaaaaaaccagaagtatcatttattatagggaacaattggagataaatctgggattgattaaataaaaattatatgtcattctagtgaaatatctgatagccatggaaaagaataaggcagatatatatggaaagattgttgagtgaatatagcatgttatagaactatatagagacatagtaggattccatttatgtatatgcatataagacatatacatatatgtatgtatttttattgttactataaatataaaaaaaaaaaccaaaccattagccatggttacttgtaggaggtgggactttgggaggggcatgtgtactttacactcttgtctgtagtttaaattatttccataggttcttttcacatctaaataacttgataaaattaacattgatacaacattatctacagacattgtttgaatgtatccagtttttccagtaatgttctttttttctggtgcaggatcagcgctctccattgcattagctatgtcttcctggtcttctctaatctgtaagaggttgtcagatttttatttgtgactttcattacctgacacttttgaagagtactggtcagttactttgtagcatggccctcaatttggatttgtcaggtgttttttcatggttagattgagattatgcattgtggcaagaatatcacagaagggacgtattgctcttctcagggcatcgcatcactgatgttgatatatcttattacctgtgatattaatgttgatctcttggtaaaggtgctgtctgccaggtttcttcaccattaagttcctatttctccatttgtatttaataagtatcttgtttgtaacaattacatggtggtgtttgcctgatggtgattttctatttccattattccttgtatttattagttagtgttcttctgtaaggatgagctgtccctatccaccaatttaattattcagtgatttatatttatgtcagtatggaaaatagcatattaaaatatgttctttataaaattaatataaactaaaaatcttgaatgtcgagttaccatttttcagaaagaacaaataatttttggtgaaaggatcccctgtcatgcagggcagagagagcagagctttcaggaagaagcccagtcttgggaccataatagaatttgagcctgcttgcagcatagagatccttaatttcatttcacagatgatgaaatggctcagagaagttgaattggcaaatcatgctgtagccaggcttaggatctatgtctgtttgattctaagactcacgtgcattccaccatcctctttcaaacatcaggagggggtgaactttaaggtccctttcaagtctgaatttctacacctatgaagtctcccaaccatgtggacctgtgacctcatcttcccttccttaggggactccagccagagacttactgccctgggggagcctcagttgctgttctacagacccagcttgtcagaacctcaaagataaggcttttaaagaacctttcagctcttccccaactaagcatgactccatacaactgcggttctcatctgcacataatttaattcctcttcagcacaaagagatggtaaatcagttgtgcatgtgtatgtgtgtgaatgtgtgtgtgtgcacgtgtgcatgtatggatatatatgtgcgtattgtgtgtggggggtagtgaaagggaaccagataaccacacttaacactgggggtcagttcaaattgttcccagcaatcaactcccagcaggcttgtcaatgcaatgcttgaaggctttcgttctgagtttcctggaagagaattgagacttttagtttttagcttacccatcataaaagaagctctattcgactccttgttctacatcacacacaccacccctgtgtccttcctagcactttttccagggcactagtatctcagtaattatttgagttatgttgcctcccctactagactatatgcactatagcagacagcgaccatatttgttttcctcattgtggtacacccagtgccttgtatagggccttgcacataacaggcactcaataaatatttgttaaataaacgaacaaatcatttagttcaaaaaatcagtgtttcctttgatgggcaagaaaggcatgcttgtgtagtggaaggcctgtgaaaagcatagtttttccttaatctgcacctgtgtattgcatgttagttagctcagcaaatgtacattttctctgggaaacttctgaaaacacaaaggttacatgccattgaatccgtgctgaatttggtgattgattttatgtttttttgatctttataaaggttgggcagtggatcaggttgttaaatagcaaagcagatatccttgttaagatatccaaaggtgtcaattctcagaaactgggtttacacacccagtgaagggcagacacagcccggtggtgttctccaaagagccacaagatggtgctgctgttgctccccaggcctggcctttttgctcacgcctgtagccgctggaataattacagtaaaaagctctttataagttagaagtgattgcccgatagaaactctgctcgaattttggctaatgatggagacttctcacaatgaatgcttttgaagaaggcctcagtgaaagccttgcattcttggtgtattttccaaaggcaccaattgagagaaggaaaaatggctggaaatggcagcctcctccccaagaaccaccagcagacagtgagccctccagcagcaaggctggattgattggctgttctctcaggcataactctgtctccagtggcattttccctcctggccctttgaatcctctcccacggatccaagttgtctgttagcagttgtatcattgagctgggttctgttctagctgcttgaagtctctgatttaattgtaatgggctaggcatgcatttgttcactcattcctccattcattcattatgcatccagtacttgctgtgtgccagatactgtgctagaaactaggaaagcaactgcaaataaggcagccaaagatttggacttgagttttcccccgacctctgctctaccctgatccagcctgattctggccagccctcgcccatggtggagggactccttttccctctgcctcattttcctattgggtctatgcctgggtcttgtacagtttgatgatctgaactgtagctttaatactgactctgagagaatgcctaggagccctgcctgtcctggacaccttatctgctggacaaagaaactgatctgagtttgggtgactaaccaaacctgttttcttggtactgagaggagagatagtcatgggatgcagaactttcagttttaagaaaagtactgatgagtttcccaggatgtgagactttcagtgctaaaacctgaaaagtcctgggcaaattggggtgggtttgtcaccataggtcagcttccccaccacactcctgacaggcctggcctccttgcctctctccacccagtgtttctgaggtccaagctactagactgagaggctaattattaatataacccctgcctgtcctgtgctttctggtcaccttaggggtgactagcaggatgcctggggaggacggggggagcatgtcttagcatgagcaatgaccttgaacaagtcacttaacctctcagcctccatttcttttattgtaaataggtataattatccctgtctcagatttcttgagaggattaagtgagttcatgcatataaagtatcaggtataaacctaaacatgtgggcacagccagatgtcgatgatatagtgagtgaaaaaagcaatggcagaaagatacatggaagtaagtctgcagctgcaatctggagtgcagagcacagggcaggttggggtagggtggtggggagtgtggctgggcctggcaagaggtgagactgaaaaggcagtcaggggccagttcccggaaggccttgaaagcctctctgaggcttttagattttactctgattgcagtagaagttgctgagggattttaggcagaggaatgaccagataggtttgggttttagaaagatgccatttcctactcatggctgttgtgtggatataatggtggtcactcagtagctgccaaaaaatatccccctttttcttattattgtatttttccccttacagtctccctggtccctttacctcatttatgtattcagcaaatctctttattaaaaagttcaacttttattttagattcaaatggtacatgtgcaggtgttacatgggtatattgtgtgatgctgaggtttggggtacaattgatcccatcatccaggtagtgagcatagtaccggacaagaggcttttcagcccctgccccctccctccctgcccccttttggaatccgtagtgtctattgttccaatctttgtgtccatgtgtacctagtgtttagctcccacttatgagtgggaacatgcggtatttggttttctgttcccatgttcgttcgcttagcataatggcctccagctgcaaccacgttgctgaagggacatgattttgttctttttttatggctgtatagtattccatggtgtatttgtgccacattttctttatccaatccaccgtggatgggcacctaggttgattccacgtctttgctattgtgaatagtgtcgtgatgaatacgagagggcatgtgtctttttggtagaatgatttattttcctttggatatataccggtactgggattgctgggttgaacgatagttctgagttctttgggaaacatctgaactgctttccacagtggctgaactaatttacattcccagcaactgtgtataaacattccatttttcccatagcctcaccagcatctgtaattttttggctttttagtaatagccattctgacggatatgagatggtatcttatagtggttttgatttgcatctctctggtgattagtaatgtggagcatttttttcatatgtttgttggccatttgtatgtcttcttttcaaaagtgtctgttcatgtcctttgcctattttttgatggggttgttttttgcttgctgatttaggtttcttacagagtctcaatattagatctttgtcagatgcatagtttgtggctattttctctcattctataggttgtctgtttaccttgttggtagtttcttttgctgtgcagatgctgtttagcttcatagggcccacttgtcagtttttgttttgttgagattgatttttgaggtcttagctataaattctttgccatgagcgatgtccagaatggtatttctcaggttttcttataggatttttatagcttgaggtcttatatttaaatctttgatccatcttgaattaatttttgtatatggtaaaaagtaggggtccagtttcattcttctgcatatgattagccagttatcccagcagcatttattgaatatagagtcctttctccattgcttgtttttgttgacttcatcgaagatcagatggttgcaggtgtgtggctttatttctgagttctctgttctgttccttgggtctatgtgtctgtttttgtacaagtaccatgctgttttggttactgtagccttataatacagtttgaagtcacataatgtgatgtctctgactttgttctttttgggtaggattgctttggctaattgggctttttaaagagtagttttttttctttctgtgaaacattatgttggtggtttgttaggaatagtgttgaatctgtagattgctttgggcagtattttaataatagtgattcttccaatccgtgaacatggaatgtttttccatttgtttgtatgatttctttcttcctcttccccttccttcctccttccccttccttccccttcctgccttccttccttcctttgaaacagggtctcactctgtcactcaggctggagtgcagtggcacaatcttggctcactgtaacctctgccttccaggctcaagcgatcctcccacctcagcctcctgagtagctggaactacaggggcataccatcacgcccatctaatttttgtacttttttgtagagatggaatcttgtcatggttgtctaggctggtctcgaattcttgggctcaagtaatccaccagccttggtctcccaaactgctaggactacaggcatgagccactgcacctggcccatctatgatttctttcagaagtgttttgcagttctccttatagcgctctttcacttccttgcttagatgttttcctaggtgtgtgtgtgtgtttatattttttttatggctattgtacatggaattcttgatttggctctcagcttgagtgttactggtatatagaaatgctattgatttttgatttttgtaccctgaaactttactgaagttgtttatcagttttaggaggcttttggcagaatatttagggttttctaggtatagaattatattgtcagtgaagagattttttaattttttaatttttttttgagatggagcctcactctgtcagccaggctgcagagcagtggtgcgatctcagctcactgcaatctccacctccccagttcaagtgattctcctgtctcagcctcctaagtagctgggattacaggtgcgcgacaccatgcctggctaatttttgtatttttagtagagatggggtttcaccatgttgaccaggctggtctcgaactcctgacatcgtgatctgtccacctcggcctcccaaagtgcgggattacaggtgtgagccactgtgcctggccaaaaagagatgatttgacttcctcttttcctatttgggtgccttttatttctttctcctgcttgattgctctggctagaacttctaatacagtgttgaataggagtggtgaaagttgacatccttgtggtgttctagttcttaaggagaatgcttccagcttttgcccattcagaatgatgttggttatgggtttcacagatggctcttactattttgaaatatgttcctttgatgcctagtttgttgagagcttttatcatgaaaagatgttgaattttattgaaaggtttctctgcatctattgagataatcatatggttttgtttaggttctgtttatgtgctgaatcacatttaaagatttgtgtatgttgaaccaaccttgcatcccaggaataaagcgtacttgatcatggtgaattaactttttgatgtgctgttggattcaatttgcttgtattttgttgaggatttggtctctatgttcatcagggatattggcctgtagttttctttttttgttgtgtctttaccagatttcggtatctgggtaatactagcttagcagaatgaatgagggaagagtccctctttctcagtttcttagaagagttttggtagagttggtaccaactcttctttgtacatttggtagaatttggcagtgaatctgtctaatccaggttttttttttttttttttttttttttttttttttttgagagggtgtctccctctgtcccccaggctggagtgcagtggtgcgatctccgctaactgcaagctccgcctcccaggttcacgccattctcctgcctcagcctcacgagtagctgggactacaggtgcccgccaccaagcctggctaattttttttttttgtatttttagtagagacggggtttcaccatgttaaacaggatggtctcgatctcctgacctcgtgatccgcctgcctcagcctcccaaagtgctgagatgacagacgtgagccacgacgcctggcctccagggtgttttttagtgggtaggtttaaaaaaaaattactgattcaattttggaacttagcattggtctgttcaatgtttcggtttcttcctgagtcaattttgggaagttgcatgtgtcaaggaaattatctacttcctctagattttctagtttgtgtgcatataggtgttcgtagtagtctttgagaatcttttgtatttctgtgagattgtaatgccagtcttgttatttctgattgtgggtgtttgggtcatctttctgttttcctttgttagtctagctagtggtcttctgatcttgtgtgtcctttcaaagaaccaacttttggttttgttgattttttttgtatggacttctggatctcaattttgttcagttctgctctgatttcagtcatttcttttcttctgctggctttggggttaatttgttcttgtttttctaatttctctagttgtaatgttagttgatttgagagctttctaatgtcttaatgtaggcatttagcattataagtttttctcttaacactgcttttgctgtgtccaagagattttggtatgttatatctctatttttatttatttcaaaaagaattttttgatttctgccttaattttgttgtttacccaaaagctgttcaagagcaagttgctcaatttttgtgtagttgtgtgaatttggaagatcttcttggtattgatacctatttttattccactgttgtctgagagtatgcttggtatgattttgatatttttgaatttattgagacttgctttatggccaagtatatggttgatttagagtatgtcccatgtgcaaatgagaaggatgtatattctgtggttgatgggtggagtgttctgtagatgtccattaggtccaattggtcaagggtcaaatttaagtccagaatttccttgttagttttttgcctcagtgatctgtctaatgctgtcagtgggatttttgaagtcccccactattaatgtgtgactgcctaagtcttttcgtaggtctaaaagcactcattttatgaatctggttgttgggtgcatatgtatttaggatagttaagtcttcatgttgaactgaactctttatcagtatgtaatgcccttctttgtccttttttttgctgttgctggcttaacgtctgttttatctgatatctgatatatccatctctttcctttgagcctatgggtatcattacatgtgagacggatctcttgaagacagcagatggatggatctcatttttttaaatccaccttgccactctgtgctttttatatggggtatttagaccatttgcattcaaggttagtattcatactgaggaatcgatcctattgtaaagttgttaatgtgttgttttgtagtttccattgagtagttgctttatagagtctgtgggctctgtacttaagtgtgtttctgtggtagcaggttttgttctttcttttacatgtttagaacccacttaaggatctcttgtaaggctggtctagtagtaatgaatttccttagcacttgcttgtccgaggaagattttatttttccttttagttatgaagtttagtttggtgggtatgaaattcttggttggagtttcttttctttaataatgcttaaaataggcccctaatgtcttctggcttatagggtttctgctgagaagtctgctgttagcctgatggagttccctttgtatgtgatctgactttttccgtagctgcctttaagatttttttcttaagattgaacagtctggtgactatatgccttggtgatgctcattttgtatagtatcttgcaaatgttctctggatttcttgtacctgaatacctacatctctaacaagattagggacattttcatgaattactccttcaagtatgttttctgggttgttacctttttctccttctccctcaggaatgccaataatttataggtttagtcattttatacaaccccatacatcttgaagactttgttcattttaaaaaactctttttgtgtattctctttttcatttaaaaaaattcctgggttagctcaaaggaccaggcttcaagctctgaaattctttcttctgtttgatctagtctattgacagagttttcagttgtgttttgatattccttaactgaatttttcaactccagaagctctgattaatttcttttaagatgtttatctcttccttcatttccaggattgttttacaggtttctttacattgattttaaacctcatcttgaaaatcattgagttttattgtaatctatgctttgaattttttatctgacacttctgggtttcaattttggttgtggactattgctagagagctagtgtgatccttcggtggtatcacaacatgcagatttttcacggtgccagaattcttatgctggttccttctcatttggagatgctggcacttctaatttttgtaataattttcgtgatgataggctctccccctttttctttccctatattactattgtttttttttctttccctttctcccaccttgctagagggtatgactgtagggcatgttggatagggtttttttggctttgcttctatggtcctatgcacttccaccagtaggttttatactggactgtgcatttcagcatgtgggccaatagatggcacttatgggtgagagctagcatggtgcaagcagatgggtatgtacctgatctttgattactgtgagatgctctctgttgttttaggtgatgggctggaccacagagtgctccttgccatgtgcttcctcttccatggggtagggtgacacagctaggcagagctggagccctggcttgcccaataatatccccgtgttgaatgtaggtaccttccttgatgagggtggctgggaggagctcctagtgaaatgagctgaggtctctgcatgggggtggggtggggggctgcaccagcccctcatccttgataggcaggaatgtggactgctcttctgtctcactcctgttccggagctcatgactcctaaatcagatgcacatcatagcctatctctggaccacagtgtggttgagagccttggggattgactaatttgtgattgtctgtgggagtggttttggggcagaacttcatcactcaacctaatgctctgtggctcccctcttctccaatgtgatagtgctacttctttgtggaagaggatggggagctctgtctttgggcctgtgcaggggtttgttggtggtggtggcattggctggttaggccagtctaacctcaggctctgggggaaaggtcaggtgccagcagatctggaatggattaggtagttctctaactccctggcccccagatggctgggtggacagagtgtataagtcctgatggggctgggggctcaggtactggctgtgatgggaaggattgggccagtccccaggtcactagctgaactctcagttggtgtgagacagggtgcttaggtggtgggagcttgagggaagctcataggttgtgggggtagggttttaagtaggcctctgggccaaagctgaaatgctcatgcagggcagcgtgggtgcactagaagccagaaggcagcaagccccatttgggagagggcagggaaggtggggggatcatgaggaaagaatctggctgcttctgtagggcagctgctggtgtgctggaggctccagtaaaggcaatcatgctttttgttctctccccagcctgtggggaagtaagagtggggatcccagtgccaggtcgatggctgagggccagtcagttgcctctgggagctccaccctagagaagcacagagccgtggcagataggagtgatcaagcaggggtgggtggctgtgctgcaggcccaaactgggagaccctgcctggtgaggagcagtaagggcatgggatcgcccggaaaacagtctggcctcttctctgtaggggagctgcagcaagctggaggccacaatagctctctggctctttgctccctccccagcctaaaggcagtacagcaggcctgtagggttacctctgggagctgcttcccagagaaatgcagagccatgactggccagagtgctcaggcaggagtagggtggctgtgctggcgacccaggccagtgggccttgcctggtgaggagcaggaaaggtagggcctacagtcctgctgctcctcagcaccgtggaggtggtccctaacctagggcttgtgaaaaagccagtccttcctggttggaggggctatggcagctggtgtcagggtattcagggatccaagacccctggggcttcacatgggcttgagcagtggctctgcccagactccaggtggctctctgtgttcacctggagccctggggaggtcatgggagatctccagtgcacaggattgcagaggtctgtggtggaagtgtgggtccctggggggctcttgctcactcaccctttcccgcagtagggagcttcccatggctctgtgttgatctcaggtgggtggctgccctactttactcttctctgctctctgtgagtcttgatgcctccttgatgaatcccaacgtgacctcctggacgatccatgtgaagagctagtgttcaacgccactttgtctcctctctgtgagagtggtgtgtactaacttcttctagccagccatctcaagttctccctagcaaatctctatgaacacacaatcatttaggactgcagttgaactcctagcctgcctctgatagagccaacccaaggctggtctataagatactgacagccctggtcccctgggtctcccaggctgcctgcagatgacacagtgatagggccagtgggggttgagggagtgacccagactggggactggcttccttgcctccctgagctgccatttccttacatctggtgaactctgagcatgcgccttgatgaacactgctctaagactttagaaccctccctggcttctgagtcttgcttttctagattcttgatgctgattcctactctgggaattgccacggggaccaggcctggggactggggaagagtggcagcaccagccttgccgagggtcatggctaccctgggaattcttctctgggcagagtccaggggcttgtaccctgtccctggtaccacttaactgttggcagcaaaccctctctccaccttttaagctggcaggactcgctcatgaatgctttgcctgcgggcccataatcagataaaagcatcagtgagatttgtggcctgtgttcagcccctcccctgctccttccctgctctgacccagctctattccctccacttgttctgtatttccatgggccggacttcatccacagttcaggtgttgacagtcattgcccttgcactttaacccacagagtctgacttcttttattattcctgttgtcttggtagaagttgctgcccaagacctgtctttaaaaattgctgttctggtggctcatggtcacccaggacagccagactcttgtgagggatgtgtgtatgagtgttgggtgaggaaggggcttgggtgaacacaataggacttcgtagaagcaaaatcaaggttgggccaggtcagtatgaggggtcctgacctctgataatcagcccacaaggtggaagctatgggggtcctaacagaacttacccaactgagccactcctagggcgccagaaacgccatgtttaggattcagccaagttgggagccagagatgtggctgtcaaaggtgagagtaggtggctagttaaaggtgacactgggaaattttgtcaaatgttttattggttcagcagcatctttgcccttaaagatgatgcttgggggacaatggatggtgacagctttaaaatccttctacctaacttgcctgcaaataactgaaaattcagtatccttgtcttgtgcgcctaatgagagagttgtagcctcggtggggagcggtcccaccacaactaaaagactgagctataacatggcagctgactgaggctgctgggaagggcagcaggggtcagcataactgagaatagggatgaccaccaagaagagcatgagagccaccgtcagggtcctcccaggggaggggagggaccctggagctgcctaagacagaaggaaaaagagaatggataaccacacagaagagacaaggcttgctcttcccacagaagcgccgcctgctagtcgtggctaccccacaccaggcagcctgcaacccctgtatgggctgcagctggacggagctgctgtggacatatctctattgaactgctgctctgccattgcagacacagagggttatgcatcatagggaaagcatggagaagtaagtgtgggcccctctgacttccacggatgaggctgattaatctcataagtagaaaaagccttgcattttgtcatctgtaaagtctttaaaaaaaatccttgttctgaaaataaagtgaaataaacacatacagtgtatgtggtacagggtctgactcacagtgagtgctctggtttcagacacactgagctcacgactccaatatttgtttgataaaccttggccttggaatcatctgctgggcagagcccaccaagctgcccctctgccctgtcctgcacagcatggcaaactcagtctctaaactcatgaacattcatggatgtgccactgctagtaataaatggcaatagtgcacattcatggggcattgtgtagtgtgtttatatctgctatggtgtgaatgcatcccccaaattaatgtgttggaagcttaatcctcagtgcaacagtgttgggggctcaggcctcatgggagggctctttaggtcataaggcttctgcctcatgaatggattaatgctgctatgaaaagagcttgcaggagtgagtttgttctcttctgcttttttgccatgtgaggacacagcattcatctcctttttgtcctttcaccttctcctatgtgagcacatagcaagaaggccctcaccagacaccagatgctggtgtcttgatcttggacttggcagcctccaggactgtgagaaagccatttctcttctttataagttacccagcctcaggcgttctgttatagcagcacaaacggattaagacaacatccattactctaatttaagctgcagcaaatttttgctcaaacaaagatagaagttataggttaactagaaacaaacccacttttataatctttacaataacagtattgaaaattatcctcattttatagataaggaaacatttatccaacaatgaaacggagtgtcttctgatacttccccttttctctttgtttctctaagaaccatgttctttattcattgccactgtccatgttagttctcatttggagaattgctacagtctcttttttgttctcactgcctcaaagttccctcctccatcctactgttcactgcaattgctccaagactaaaaagtaatcatgctacgcctctgcttaaaagtgaaaattaggccgggcatcgtggctcacacctgtaataccagtggcttgggaggctaaggtgagaggattgctggaggccaggagtttgagaccagcctgggcaacatagtgacgctctgtccctataaaaaatagaaaaatttagctgggtgtagtgtgtgcacctgtagtcctggctactcaggaggctgaggcaggaggattgcttgagcccaaaagtttgaggttacagtgaactaccattgtgccactgcacttcagactggacaacagagtgagaccctgtctccaatttaaaaaaaaaaaaggtgcaaagcagtcccagttgtcccctggatagagtccacattctttagtgtgatgcccaagactgtcctttgtctgatacatgtcaacttttccagaattatttctcatcacaccttgccctgaacgccactaacattctttcatatatgccagggtagactttgctcagcctgagcctatactggtttatctatttaattttttatatttttagaaataagaactcttggagcttttgaaaaataacaaactgagctccattttcaaattaattaatttctgttatcttcagttattccttctgttccctctagttaggattacttgattgttttaacaccccgttctgctccccactccaggtgggctcagcccccttggcaatagtgagggtagggagaatattcaagcagaagtttttcttgcttattttgatcctaggctttgttttcttggtgcgtggttacctttatgtacccacattgactagtagaactgtcaaagctgggtgtatgtgaatttttacctgcactgactgatgacaggagagtccatagggtagaagttagtctgtagcaccccacaagttttgaaacctaccaagttggtttcatactttataagacctgaaatcctctttttttgattttctttttaaaataattccatttaggtcccttcctgtatttcttctgcaatttttctatttccacctacacggaaccatataaaaccatattaagtaggcatttcctgttgtttcttcagtcattctactttaaaatgagggtcgttgtcttagacaaccttgtttgtagtcctaggcaatcttgtttggtacctgagggataatcatgagaaaatgacaaatcttacagtaatatacatatttgtacaagtgtgcaaagatgtatgagtaagaatatttattgcagcagtgtttgtaatatccaaaattgtaaacaactgaaatgtcagtcgagagggagcttgttaaatgcatgtgattacagccatacaactgaatatcatgtttccattgagagaagcctatatgtaccaatatggagggttaccatttatatgcttaggtgaaaagaacaaattttatgtaaagtacaaaagtatgattccatttctgttaaaaagagattattatatacatatatacccttcatagcctggaaagtttttaaaggaatattcgccaaattgtaaaattagttaaggtattggttgaggggtggttgtagtagggaatggaattacagaagagaggacttcataatctaatttatatattcctgaatatttacttttatctttacaaaaacaatgtgttacttttataatcaggaaaaaagctttaaaatgtatatcttctgagatgcaactacagcaattataagtggaaaatttattgcctctaatgctagaatttctaaacagaaagaatgaacatgaacttatcgataaataaaatatgagtagatttcacactggtttaggaataaatggacataagtaaaaagtaatcaaagcacaattaaatagaacaaatacagggacacagattaattttgacaccagctggagccagcaacacatctagcaaatctagcatctatctagttatgcttctgtgaaaaacatggtttgcaaaacctttgaaaggagcaaccaggtcttataactggtggagcatgtagctcagtgcggttttgatttctgatttttgtttgaaacaaaagttgttcaggagacaggatgtttcttactaattaggcttcctttttttgtttgtgtcaacttttgtgccattttttgttactcaattttatggtatttttgaagaatgtgttatgtgctatttctttttttctcctttatttttaaatttcaatagtttttggggacaggtggttcctggttacatggataagttctttagtggtaatttctgagattttggtgcagtcatcacccgagcagtgtccactgtacccatgtgtagtcttttatcccttacctccctcttgcccttccgcctgagtccccaaagttcatcacatcattcttacgcctttgtgtcctcaaacttagcttccacttataattgagaacatacagttttggttttccattcctgagttacttagaatcatggtctccaactttatccactttgttgtgaatgccattatttccttctttttatggctgactagtatcccatggtatatagataccatattttaaaaatctactcattggttgttgggcatttaagctcgttccatatttttgcaattacgaattgtgctgttataaccatgtatgtgcaagtgtctttttcatataatgatttcttttcctctggatagatactgagtagtgggattgcgggatcaaatggtagttctacttttagtcctctaaggaatctccatactggtgtggatttagtaagttttctttagaattaacttctgtaaacaatctatggggccttaaaatgtatgcttgtttttgagcatatattttgagcatacattttgaaggtgtagagtttgaaatttatctattggatagaccttataaattttattaatcaggtcctgtgcagttttgattatttttagtccccttgatctgtcctgggataagaactgtgagtcttttttttttttttttaagttctccttgtatttacaacagtttctgtattacatattttgatgacacatgctacttagtgcttgaacgttcaaagtatctatgttttcatcatgcagtactatttttattataattggccccattcttccagtttaatatctttttttgttttttttgagacagagccttgctctgtcacccaggctggagtgcagtggtgcagtcttggctcagtgcaacctctgcctcctgggttcaagcaatttctactgcctcagcctcgtgagtagctgggactataggcacacgccgccacacctggctaattttttgtattttagggtttcatcgtgttgtccaggctggtctcgaactcctgagctcaggcagtctgcctgtcttggcctcccaaagtactaggattacaggcataagccaccatgcccggccttatctttttactttgaattcaaatttgatattatcacaaaaacattgattgcttctttctttttctttctttcttttcattctcttttctttctttctcttttctttctttcttttctctctctttctctctctctctcttcctctctttcttcctttcttcctctctttctttctctccttctttccttctctctcactctttctcactctgtcacccaggctggaatgcagtggcccgatcatggctcactgcagcctcgacctcctgggctcaagagatggtcccacctcagctttccaagcagctaggactacaggcatgtgccaccacacccggctaatttgtgtattttttgtagagatggggtttcaccgtgttgcccaggctgatcttgaactcctgggctcaagcgatctgcttgcctctgcctcccaaagtgctgggattacaggtgtgagccactgcacccagccaatttcttttttatataacaattgtattgggatataattcacctaccatataatctaccagtttaaagtgtacagttccatgagttttagtatactcagagagttgtgcaaccatcaccacaataaattgtggagcattttcatcatgtcaacaagaaaactacccaccagcagtcactccccatatttattccaatctcctgagccctaggcagtcaccaatctactctcatgtctatagattggcctattctggacatttcatatcaatggaatgatataatatgtggtcttttgtgactggcttcttttatttaggatgttttcaaggtatataaatgttacatccatgaagtaacagtgcttcattccattttattatggaacaatattacattatatgggtataccacattttatttattcatcacttgatagacatttgagttgtttctactttttgctattatccttgctatgctcatccatgtacaatttttttgtgtggtcatgttttcgtttctcttgagtatatacctatctttacaaaaataatgtgttatttttataatcaggaaaaaagctttaaaatgtgtgtcttctgggatgcaactacagcaaatgtgggtggaaaatttattgcctttaatgctagaatttctaaacagaaagaatgaaaatgaacttctagacatatagaattgctgggtcacgtggtaactgtctaaacttttgaggaactgccatgctgttttattgtcttctgttttccaaagtgggtacaacattttacaccagcagtgtatgaggattccaatgtgtgcacctcctcaccaatacttattatctgtatttttgattatggaccatatagtgggtgtgaagtagtatctcattgtgttttgacttgcatttcccctgacagctactgatggagttttcacaatataaattttgtaattcttttgttaaatatcccctcaaatattttattcttattgatgccattataaatagaattgtttgcttagttttcctttttgggttgttcattgctaatgtataaaaatacaattgatttttgttttcatttttgtttgacttccaacatttattttaagttcaggggtacctgtgtgggatgtacaggtttgttacataggtaaatgtgtgccatgctagtttgctgcatatatcatcccttcagctaggtgttaagcccagcattcactagctgttcttcctgatgctctcctctgacaggccccagtgattgttgttcacccctatgtgtccatgtgttatcattcagctcctacttattagtgagaacatgcagtatttgattttctcttcctgtgttagtttgcagctccatctatgtccctgcaaaggacatgatcttgttcctttttatggctgcatagtattccatggtgtctatgtacgacattttctttattcagtctataattgattggcatttaggttgatttcatgtatttgctattgtaaatagtactgcagtgaacatacacttgcgtgtctctttataatagaatgatttatattcctttggatatatacccagtaatgggattgctgggtcaaatgatatttctgcctctaggtctttgaggaattgccacactctcttccacaatggttggactaattaacacttccaccaacagtgtagaagcattcctttttctccacaaccttgccaacatctgttttttttttttttttttgactttttaataatggccatactgactggtgtgagatggtatctcattgagattttgatttgcatttctctgatgatcagtgatgttgagctttttttcatgtgtttgttagatgcatgtatgtcttcttttgagaagtgtcttttcatgttgttttcctacttttaatggggttgtttttttcttgtaaatttgtttaagttttttgtagatgctggatgttagacctttgtcagatgatggattgcaaatagattgtttactgtgatgatagtgtcttttgctgtgcagaagctctttagtttaattagatcccatttgtcaatttttgcttttgttgcaattgcttttggcatctttgtcattaatttttttcccatgcctatgtcctgaatggtattgcctaagttttcctctaggatttttataattttgggttttacatttaatctttaatccatcttgagttgatttttgtatatgtttaaggaaggggtccagtttcaattttctgcatttattatatagggaaccctttcccattgcttgtttttgtcaggtttgtgaaaaatcagatggttgtaggtgtgtggtcttatttctgggtactctattctgttccattggtctgtgtgtctgttttggtaccagtaccatgctgttttggtttctgtaggcttgtgtagttttaagttaggtagtatgatgcctctggctttgttctttttgcttaggatcatcttggctattcaggctcttttttggttccatatgaattttaaaatagttttttctaattctgtgaagaatgtcaattgtagtttaatgggaatagcattgaatctataaatacaattgatttttgtatattgattttatatcctcaaacctcgctaaacatttattagttcaaattatttttcagtggttttcttagaattttctgtatataagattctttcatcttaaatagagataatttacttattttctaatcgggatgccttttttttctttttcttgcctaattggtcttgctagaacctccagtacaatgttaaatataagtgaacatccttgtcttgttcctgatcttagggggaaagtatttagtctttcattatttactatgatgctggctatgagtttttcatagatgccctttatgaagttgagaaaattctcttctatttcttgtttatgaagtatatttattttgataaatatttgatttccctccatctcttgaggtgatcatttggtttttgtcccttattgatatggtaccttacattaattgatcttcagatgctaagccaaccttgtgtttctgagataattgtactttgtcatggtaatatgatcctttttatatattgctggattaagtttgctagtgtttttttgagcatgttctgtgtctatattcattagagcaattggcctatagttttcttttcttatgatatcttcatctggtttgggcatcagggtaatgctggcctcatagaatgagttgggaaatgttacctcctcttctaatttttgaaggagtttgtgaagaaatggttttacttattttttaaatgtttggtagaatttaccagtaaagtcatgtgggcctgggcttttcttcgtgacatgtttttaacttacgaattcagtcttttgacttgttatatatctactcaaactttctatttcttcttgagtaagttttaatagtttgtctgtttcatataagttatctaatatgttggcatacatttgttcacaatactaccatgtaatcctttttcttcctgtaaggccattagtaatgtctcttgtttcattcttgattttagtaacttgagtctttctctttctctcttctatttttaactaacagtttgtcagttttgttcatcttttcaaataatcaacttttgcttttgttgatcgtcttttaaaatttgctctttcactaatttctacgtaacctttagtacttccttctacttgctttgggcttagttttctctactgttttttgtttacaatttttacctgagagctctcccttaatgagaaatttgcactcaaatgcccatctcaagctctgctcctaggaaacttgacctaagacattccaggcagaaatttcctcttaccccagcatttggccactctttctccagctccttctctcatctctgtttctccctactttcccaaatgtagtttaatggtatagacttccaaggcccagaccttaggaccataaaagacccaatttacttctcctgggcttgagaaagacatgcttctcttaagtagcagaagccaataataaggttgagttttcttatgctgctacattaaatccttaatataactctccctattatattaggaggtcacatgttcactagctatttttatatcttttgtaagttatcactttctgttatttaccatttgtttggtaatttatgtctctatgagtaatgctaaccttttgtctgtaacaaacatatgttgaaaatatttttccaagtttatttattggtcacacagaaggtttatgttttttttttgtttttttgttttttgtttttttgagacagagtcttgctctgtcacccaggctggagtgcaatggtacgatctcagctcactgcaacctcctccttctgggttcaagcgattctcctgccttagcctcccaagtagctgggattgcaggcacctgccaccatgcctgggtaatttttgtatttttagtacagatggggttccgccatgttggccaggctggtctcgaactcctgacctcaggtgatctgcccgccttggcctcccaaagtgctgggattacaggcatgagccactgtgcctggccctacatttttatgtagtacaatctgtcagtctttcctgtttggtttctgttattgacgtgatgatttaaaaatgccttccccatcctggagttataaaactatttacctaaatttccttatggtattcttttgcataccctttttatttttacatctttgattgatttttttttgtgtgtgtaaagagtgagataggcatccagcttaattttttctccaaaggactagtaaattgggagaggtgtaccagagtgttttcctaggtcttgattctatgatagtagccatgtgaagttaagtaagttaattcccttccccaagccctattttcttatctgtaaaatgaggataaaatggcagttatctcacagcgttgttgtgagaattacaggagaaactacatgtaaggcattgcctgcacttaagtgttagctatttttattatgtagttctagatactagctatagatattagctgtttttattatgtggctctgttctgatagctgtgtgatatctcttcttcctgcccatttctatgagagttttgttggttcaaagagttcttagaaacatttgttccctaattaaaaatggaaaattatttgtacaacctcaaatgccctcaaaacagataataataataataaaaataataatagtaatagacaacggctattttgcacacacatatgggaacagtgggagcaagagatgtgggtttatgtgttttccttgactacaagttgtaaaagccaagagagctcaagaagagatccaatcaacatcacctcttgctcaaatgtaaattgcaaaagaaactcagttgcaaagtgcccaagcatatgctcagataatttccaaagtttgtttttagtttctacattggcaagagagcaagtacttttctacttccagtgtcttcaggggctggagacttctctatttcctcttttgcatacacttggcctatcaattatttaataatcaattctccagcacacttcctattgatttcctttcattttgaagtttccttttttttttttaaattatactttaagttccaggatacatgtgcagaacatgcaggcttgttacataggtatacatgtgccatggtggtttgctgcatccatcaacccatcatctaggttttaagccccacatgcattaggtatttgtcctaatgctatccctccccttgccccccaccccctgacaggccccagtgtgtgatgcccccctccctgcgtccatgtgttcttattgttcaactcccacttatgagtgagaacatgcggcgtttggttttctgtttggtttgtgttagtttgctgagaatgatggtttctagcttcatccatgtccctgcaaaggacatgaacttatccttttttatggctgcatagtattccatggtgtatatgtgccacattttctttatccagtctattattgatgggcatttgggttggttccaagtctttgctattgtgaatagcgttgcaataaaaatggatgtgcatatgtctttacagtaaaatgatttataatcctttgggtatatacccagtaatggaattgctaggtcaaatggtatttgtggttccagatccttgaggaattgccacactgtcttccacaatggttgaactaatttaccctcccaccaacagtgtaaaagcattcctatttctccacatcctctccagcatctgttgtttcctgacgttttaatgatcgccattctaagtggtgtgagatggtatctcattgtggttttgatatgcatttctctgatgaccagtgatgatgagcctttttttttttccatatgtttgttggccacataaatgtcttctttgagaagtgtctgttcatatccttcacccactttttgatggggttgtttgtttttttcttgtaaatttgtataagttctttgtagattctggatattagacctttgttggatggatacattgcaaaaattttctcccattctgtaggttgcctattcactctgatgatagtttcttttgctgtgcagaagctctttagtttaattagatcacatttgtcaattttggcttttgttgcaattgcttttggtgttttagtcatgaagtctttgcccatgcctatgtccagaatggtatagcctaggttttcttctagggtttttatgggtttagttcttacgtttaaatctttaatccatcttgagttaatttttgtataaggtttaaggaaggggtccagtttcagttttctgcatacggctagccagttttcccaacaccacttattaaatagtgaatcctttccttattgcttatttttgtcaggtttgtcaaagatcagattattgtaggtgtgtgatgttatttctgaggcttatgttatgttccattggtctatatatctgttttgtaaccagtaccatgctatttcggttactgcagccttgtagtttgaagtcaggtagcatgatgcctccagctttgttctttttgcttaggattgtcttagctatacaggctgttttttggttccatataaaatgtaaagtagttttttctaattctgtgaagaaattcaatggtggcttgatgggaatagcattgaatctataaattactttgggcagtatggccattttcacaatattattttttcctatccatgagcatggaatgtttttccatgtctttgtgccctctcttatttccttgagcagtggtttgtagttctctttgaagaggtccttcacatcccttgtaagttggattcctaggtattttattctctttgtagcaattgtgaatgggagttcactcatgatttggctgtttgtctgttattggtgtataggaatgcttgtgatttttgcacattgattttgtatcctgagactttgctgaagttgcttatcagcttaaggagattttgggttgagacgacagggttttctaaatatacaatcatgtcatctgcaaacagagacaatttgacttgctcttcttgctatttgaataatctttatttctatctcttgcctgattggcctggccagaacttccagtagttgaataggagtggtgagagagggcatccttgtcttgtgctggttttcaaagggaatgcttccagcttttgcctattcagtatgatattggctatgggtttgtcataaatagctcttactattttgaaatatgttccatcaatacctagtttattgtttttagcatgaaggggtgttgaattttaccaaaggccttttctgcctctattgagacaatcatgtggtttctgtcattggttctgttaatttgatggattatgtttattgatttgtgtatgttgaaccagccttgcatcccagggatgaagccaacttgattgtggtggataagctttttgatgtgctgctggattttgtttgccagtattttattgaggatttttgcattgatgttcataagggatattggcctgaaattttccttttttgttgtgtctctgccaggttttggtatcaggatgatgctggcctgataaaatgaattagggaggagtctctctttttttattgtttggaatagtttcaggaggaattataccagctcctctttgtaactctggtaaaatttggctgtgaatctgtctggttctgggattttagtagactattaattactgcctcaatttcagaatttattattggtctattcagggatttgacttcttcctggtttagtcttgggagggtgtatgatgaacacatactttctaccgaaaagagctgaacctgtcagtatcttatattaacatcatgttgctgtgaagacagagtccatgcttcttatcatgatgtaaattcaactcagggagaagtgtctagtctttatagtatattacagggtaattataaggcaataactggttctctggtagttgaggcagggatggatattgtacagcagaggctgctccaccctgacactggagacacctattgtaaacagacaggggctggtgttctcttgccattgtgcactgtgattatagaaagtgtggtaggcactgtgagtttccaagtgaagatgctgtaatgggggatgatatgagttgaaggctaaaaaaaaagtggggtatgacttgtgtacaactaaagagaaaagttggcaaaaagggaaatgtgaaaagaaagactagcactaatgtgaggtaggaagccaaggctctaggagacagcctatgggggaacaagtggaggtgggcttctgcaatgctgaggctcaatactgcaatgctgaggtgggattctgcaatgcttgaggctcaaggaccctgcttgaagataactacggggcagcctgggttaacaatgctgacttagacagctctttcttccatccttctctgagaccagaggggatgggtactggcaaattcgggatcagagtaggggttcttaacttggggtccattgaaaagtctttgatagaattctgggagtctatgaactcagaagggaaaaatattacgtttctattttctctaatatctaattgaaatttaccatttctttcagttactgaatgtaggcaccaaattacagtagtattaacagtgtctgtgactttgttaccagtaaaaaaaaaatcacagatattttaatttcacattagagtcattgcagatacatcaaacatcattcatactcactactttgaaattatggatattattaggccctctgatacatctcgtttaatacattaataaagaagcccatatattcttatagcatattttaaaaacattttgatgagtgtattttaatatttttggtttcctgtgtcacccattgttttttattttgtgcatttaaaaatagtattctgagaagtgattcataggcttcaacagattaccaatgtagtacttgaacaaaaaggtcaagaaacacaaatggataggaggaatgaatattgtgaaaatggccatactgcccaaggtaatttatagattcaatgtcatccccatcaagctaccaatgactttcttcacagaattggaaaaaactactttaaagttcatatggaaccaaaaaggagcccacattgccaagtcaatcctaagccaaaagaacaaagctggaggcatcacgctacctgacttcaaactatactacaaagctacagtaaccaaaatagcatggtactggtaccaaaacagagatacagaccaatggaacagaatagagcccttggaaataatagcacacatctacaaccatctgatctttgacaaacctgacaaagacaagaaatggggaaagattccctatttaatgatgctgggaaaactggctagccatatgtagaaagctgaaactggatctcttccttacaccttatacaaaaatcaattcaagatggattaaagacttaaatgttagacctaaaaccataaaaactctagaagaaaacctaggcaataccattcaggacataggcatgggcaaggacttcatgactaaaacactaaaagcaatggcaacaaaagccaaaattgacaaatggggtctaattaaaccaaagagcttctgcacagcagaagaaactaccatcagagtgaacaggcaacctacagaatgggagaaaatttttacaatctactcatctgacaaagggctaatatccagaatctacaaagaacttaaacaaatttacaagaaaaaatcacccccatcaacaagtgggtgaaggatatgaacagacacttatcaaaagaagacatttatgcagccaacagacacataaaaaaatgctcatcatcactggccatcagagaaatgcaaatcaaaaccacaatgagataccatctcacaccagttagaatggcgatcattaaagtcaggaaacaacaggtgctggagaggatgtggagaaataggaagacttttacactgttggtgggactgtaaactacttcaacccttgtggaagacagtgtggcagttgctcaaggatctagaactagaaataccatttgacccagccatcccattactgggcgtatacccaatggattataaattatgctgctataaagacacatgcacacgtatgtttactgcagcactattcacaatagcaaagacttggaaccaacccaaacgtccatcaatgatagactggactaagaaaatgtggcacatatacaccatggaatactatgcagccataaaaaaggatgagttcgtgtcctttatagggacatggatgaaggtggaaaccatcattctgagcaaactattgcaaggatagaaaaccaaacaccgcatgttctcactcataggcgggaattgaacaatgagaacacacggacacagggtggggaacatcacacactggggcctgtcatcaggtagggggagcagggagggatagcattaggagatatacctaatgtaaatgacaagttaacaggtacagcacaccaacatggcacatgtatacatatgtaacaaacctgcacattgtgcacatgtaccctagaacttaaagtgaaataataaaaaaaaggcctagatgaaaaaaaaaaaagatcaagaaatgctgggttagatggtgcagaaggggtagatagctagggagactcttatctttggaacctagagggaggaggttgttgtcaaagagaaaattgagagcatgctttgggaggtgtaaggacccaactgcctggacttttgaccatgcattgctgctgtagtttgttcagggtggtcctcaggtctgcgctggctccctgggcagatgatggagctgaaagaacatgagtctcagggcctgttcaaggctggtggacctaggtctggaaagataagctatggtaagaatgctgcttgcctgattagtctcagattgtctatctgataactgagttggcagttctgagattaagagctaggcttgccgcagaccgactgggtcagcgtggactagccatgtaactttttttttttttctttttgagacagagacttgctctgtcgctcaggctggagcacagtgatgcgatctcagctcactgcaacctccacctccagggttcaagtgtttctcgtgccttagcctcccaagtagctgggactacgggcacgactaatttttgtatttttgtagagatggtgtttcgccatgtcagccaagctgggtctcgccattttggccacttctccatgttggcctgatccatggatcaccccaagtgatccacccacctcggcctcccaaagtgctgagattacaggcgtgagccactgcacctggcccagccatgtaacaacttcttttttttaaagatggagtcctgctctgtcacccaggctggagtgcagtggcgcaatcatagtcctgctctgtcacccaggctggagtgcagtggcgcaatcatagtcctgctctgtcacccagggtggagtgcagtggcgcaatcatagctcactgcaaccttcgcctcacaggttcaagcaattctcttcctcagcctcctgagtagctgggattacaggtgcaccaccaggcctggctaattttttgtatttttagtagagacagggtttcatcatgttggacaggctggtctcgaactcctgacctcaggtgatcctcccggcttggcctcccaaaatgctgggattacaggcgtgagccactgtgcccagtagccatgtaacttctgacctctagttttctcatctctagattgccattcattcagttaatattgattaagctccaagcactgtgtaggaggctgaagcctctacaatcattgagtggattaaatgagatgctgcgtccgaaagcactttgaaaagagatgctcccattgaatcagttccttttaaagttacccatattttctgctctttagtcaagttgcctgttgaagagaagagacttgggtctttccaaaaagagtcagcctagggagtttgcagctccactgggtcgacccttccagtcaccctgacaatgcagggtaaagcgtcaggaccaaattccagagagttgttttttttttgccagatgagaccagactgctgaattcggttagagctttcagcctggctaacagggtgtgcatggttatttatgcactgaagtgctctgataattaagctcattcaatgtcacaatgattggttacttaagaggcctgaatcatcataagtgaagactgtcatttgaatgtatgtcacactgcttgacttagaagtacagcacagtttattgcaagaaggccaaaggaaaaaaatgttcatgtgttgaaggcaaaagaggcaggtcagggcaagtgggccagaccctgctgtgatccagaaggcactggaagccttcaaggatacccttttctcttggtagaacagaagagggcatgccagcttttaaatcaacacagttctaccttcccaggtataggccttctggaaacaagattttaggtcatcactaaaggtgacaacctttgctgatcatacctcttacattgtctatcttccaaccttggctaccagccctacttttgggagtttgacagctgaggccttgcagaacctgtgaactcactggtgcggcgatggccacggaagagctgattctaattgtaaagacagcagaaggtgaaaagcttgggctctggctctagacttctcatatcccaccattgcactgactggctgggtcactctggctagttgcttagcatctctgagcctttttctttatctcaaacataagaatggcagtagctatcatactggattttctgaagattaaagagagaatgattcttttttttttttttttgagacggagtctcgctctgtcgcccaggccggactgcggactgcagtggcgcaatcttaaaagagagaatgattctaaagcacttggctccatgcctggtctacagtaggtgctaaatcaatgttagctgttgttactactggggggttgctgtggatggaagcaaacttgtcagaccctcctgggttgtgttgctttccccaaacccccttttcttctggcattgtgtcttctgctctgattggcgccctctctctattcctaggaaaattcttgcacatttttctcttggtcctttagtttaaaaacttggcttgcgtttcccccaagagcagaataaacaaatctcttttataaggctgtaggattctgataggaaagttcttcagaatcttgaacaaggtcaggaaatgtcaccttctgacttcagtgcttggaaaattagcataagggaggcaggggaaggaaggaaaggacttggccacttcttaaactgaagggacgattacatcacttgtgagtggcatgttcttggatacatggtttaacctgtctgagcccagggctgttgtggctgagacagtgctatgtccaccacaaactctcctttctatggtatggtgttggtgttttcactgaggggtgcctgtctagccagaaattccacattccacctgcacttccatttaagtgaggccacttgaccagttctccccagtgggatgtgaatggcagcgatgcatcctttgtgagctgaggcttttaagaagctggtgaggcttcctatgctttctttctgcttctgctggctagaaacaaaggacactgaggccctcgggggatggtagagccacaggaagcaccccgggtccttaaatcaacatgcggaggaaagccaacggccagccatggatacttgcattggacttttaagtgaatgagaggtaaatttctattatgtgaagatattgcaaatactgggtttatttgttataatagctagtgttattctaactaataaagccatcgtataaaaggggtgtactagtttgaagtgcttcacaaacccaggttgcaaatgtcgtattcattgatgtattcatctgttcgctttcaaaaataaatatttattaagcacattctgtaggccctgctctaagtgctggagatacagtgaagtgcaagacagatgaaagccctgctcatataaggcatttacaaatataaggatgatgaaaataacctccttcccctcttcccacactggtgatatttcatctccatcaaatacttgcttctaaaccatgctctttcctgcctccatgctgttggagaagtgttctcttcctgtgaactccttctctttatagacccagctctcccgtgggcagcccctgaggagaggaactcctcaggccaaggcagcaactcccttctacctgtcttcctgccctgacaacagcatgagctgtgttgtagtctgtttgcttttttatgcactgatttccctctgcagtctgtgacctccttctcatccacctttgtattttagactattgcacaatgctgggcatacagcaggtgctcgctgaatatttgtagagttaatctgaatataaaaccaccagaaatgactatttggttttgtcaggaacctgcaaaatgcattgtgtgcgtgtattatttttatttttttgagacagaatctccctcttttgtccaggttggagttcagtggcttgatcttggctcactgcaacctctgcctcccgggctcaagcgattctcatgcctcaacctcccaagtagctgagattataggcatgtaccaccatgcctggctaatttttgtagttttggtagaaatggggtgtcaccatgttggccaggctggtcttggactcctgacctcacatgatccacctgcctcagcctcccaaagtgctgggattacagggatgagccactatgcccggactgcattgttttgaaagcagcttttgtttagtgtcagtgtctagaacaccagcccctttcactctgtgcatatggtgactgagctgatttcatttagtatgtgcataaatactcttatttctcagatacaaggcaagatttctttgttttcttgtttgtttctttgcttcccctggttgcaaaacatatcctctctacctcctggcaaatctgacaacacgtcctcagactgatgaaacagagtccactagatcctcttgatgggggcatgagggtttgggtaagggtgggatgaggtgagtttccatctgtgaattctcagattttgctctttattcttcaaattctcatcagactgacagccagtgatgcgtgggtgaagataagaccatagctgagaaatctcttccgtttatggcagaggtcatttcattgacattccttggagaaccttattgcaggaagatagggaggaagagaagagagcacccattctgtgagcacccttatctgtaaaaggtccctggtgtctcccctttgggctggaataaaatgagactttagttatggaagagaagaaagaaagtggtttttatgataggaggaggctgaagaaagggaagcagggtgaatggcgtatactcagggaggatcagaggtttgagtggagataaatgaacaaaaccatcttggagaccagatttttcagaggatgggggcatggaagagaccatcagttctttgggcagaagtagaggagttcctctgcaataggagagggggatgttaaggggattagcagtgttatctgttttgggatgctgaaggatgttttgccccctttaaatggtgattgatctgggaaagaccccaatatatgaagcagaccctcaggagtataggtctaaagccccaggaatgctcaccacacctgggaggctctgttactgggaacagtggtgctaatgagaaagtcaatcatgccttttggggttactgctattggtggcctgctcagagcccctttattgggaggtgtgcccatcatccctcagctactgggagtgctgtagctaatggtttctacctaagaacttacctaagaattggccctgaatgactgaaggtatatcatctggcagtacctgggaagttggtcccccatctccttggtgtgtcagtgactgatacaggtgcacagaatgtcagctccttgccttaaggcagatcaacactgtggtgtgatttatgctccagagctcccaatggatcaggccaaggctagattttaccccaaaccccattcttactggactcttccttccctcttctacttccttccctcccttacggatttcttctgacaactttaccttgatacaacacctgcatctgaatccctatcccaggttctgcttccagaggactcacctcaagactcaacctactctgtgccaggttccatggtggtcctcacaacaaccccctggggcaagactgcttccctcctgccccacactgcccccttggcccagaaggggcttccaggctcctctgcagccccctcactggtcgctaaccctactgcttagagcttaatgttcactgggccacctcttgctagtaagcaagacctctgcatgccagtgagcagtgtctctgttctgcctgcccctgggaagtggagactggctattcttgctacatgactggtagggtctgtggactcagtgtttgcttggaagacctggtcacatagatttctttccataggtgagcatgcaaagcccaagatttaggttttggggcaggagggtagggggctcactcagacctggggacttgtttgtgacctccagttgccctttgtctagagaagtttgtatttgaatactgcatgtgtgctcgaagctggggctgtttctgttctgtctgtggacccttaggtgtctgttccttggcagaaatccaggaggggatgaggagtgaacggtggggcttaagcatcagccccctacccctgaacccctgacaagccctgcaaaataaatattaagattcctgtttgactagagaggaaaccaagtcttagaaagcttagatggcccgaggatgaaatttagtattgtctgaggtggaatttgaatcctggattggctagttccaaagctcaggcttttttttttttttttttaatccataccagagattggcaaactacaggtgaaatcttgcccactgcctgtttttatgactaaagttttattagaacatagccatgctcatctgtttagattagattatggctacatttgggccaccctggcagagttgagtagttgcaacagagaccctatggcccacaaagcctaaagtatttgctgtcaggacctttgcagaaaatgtttgctgacccctgctctgcactctattctctcagggagtgttccttttagagtccagggagcccaagacactgaggggtggaaagatacctggtctttatatccaaagctctgggtacaaattttgactgtgtaacactagtcaaggcatcagtagacttgacttctcttagtcttggttaattcatctttaaaagggagagaagagcagcccccaaaaatagttttgttttgaggatgaaataaatgaacagtgataaataatgattttaaatatttgagttgaaataatctgtataccaaaccctcatgacacacagtttacctatataacaaacctggttgtgtacccctgatcctaaaataaaagttgaaaaaaaggttaccgagtgcttattatgtgccaggtccttcacgtacattatctcttttaattcctataagtgtccagtacgtggtagacattcaataagaagacattgaatgaatgaggtaggtacttattattcccatttctcagataaggaaatagaggctcagagaagtgaagcaacttccccagggcttggctgcctgtgatggctggattcagcacaggcatgagagaggaagggcactgtgttcctgctgaaggggagggtttttctcttcctgggaaaacttgtggtctttggggctggtttccactgaaggtagtgagtattgctttctctcagcttctcctccttcaatttaatcagattctattctatcctcttcaacttcccctacattatgtagcaactgggattgtcagcaaacccatcatcttgttgttgtcagtaaaacaaagattatctgcctcagaaaagtgaacacttgggagtcataattatgggaatcacttgtagtttgggtccatttgaatgtgtttgagccgcaagcgaaacagatagtgtgctcgaaaccttttctagttgtggccctggttatttttgtcctgcagaaagaagtagaactgtcactctacctgcacagggcagacaaagccacctctctcaccagctgcccctgacctttgtggacaactgcacatggaatgaatagaatcctgaaaacttctcaggagtttaatagcttcaatgaataaagaattttggttccaggaaaaggaaaataaactgaattgatttgaggaaaaatcattgtgttagtttgtgtttccctggatgcagactcagaaacagagatagcgaagaaagtttcctttttgggattggattccagaaaatgcagtgggaaacactgggaagtgagacagggaagggaagtgatatggttaggctttgtgtccccactcaaatatcatcatgaattataatccccataatcctcacatgtcaagggtgagaccaggtggaggtaattgaatcatgtggccggtttctccgatgctgttcccgtgctagtgagttcgttcttactagatctgatggttttataagtgcttggttgttccttctctgttcattgtccttcctgccgccttgtggagaagtgccttgcttcgccttcgcctttcaccaagattgtaagtgtcctgagccccccaccccggccgcccccagccatgctgaactctgagtcaattaaatctctctcctttataaattacccagtcttgggcagttctttaaagcagcgtgagaacgaactaatacaggaaggaagtctatgcaggatgtgttctcaggtagatgaccaccttgggcaaaagaagattaattccactagagaactctgagagccagaacagaactgcataattatccccctcaaggggtgagagagctggggtagttagacacccactttcatcagccatgggttgaggtatggcattttcagttggctttgctggcagaccgcagagatggaagttggttggcatgccctgaaatggtgaggctccaggagacatgggtgggaccccttcaagaactgctacaaactcctgctctgaaatcagactacctggattcaaacctccgatgttccttcctatttgttatgtgaccttgggcaagtcacttaagccctttagtcttagctgttgaatagaaaatatgatagtccagactttaccaggtggctgtgaagattaaaagagataaggcatgcaagacacttacagggtacctggcacaaggcaaacactcaacagactttagctgttatttgtaactagtctatttattgtactgaaactgactgggggaacattcagacctagacgatgttatggggaaaaatagacaagaaacaacaacccaaggttttatccaagagctatgtgatgtagagtgtgaccagtggacagcattgtatatttggacaaatatgaatatataaacttttgagttgtctttcggatattagcttgtttataggaggatcctctgcgcagttgatgaagcccatgtagctggaatcaaaagcttctgtacccatgggctgaactggtagtagcaaactgaccagggaattagagcatgacacccaagatagtgggaaccagctgagatgcaggtcataatcatgataacagcaggtaacatttactgagaattttctgtgtcaagccatgtgcaaaacacatcaccagattatgacattttctcatcacaatagtccaaggtggtgtccctgtcatgacagcctgcctactctcctttcagagtgcatgttaaaataacctctcactgcaaccagtggatttcccagtagtctctcttttttttttatttttttctggagtccggcctttcataacaagcccccaggtgcatttggagttgctacctgtaaatgtggcaggatttctcttcatcagacttttgtccctgttctcttccctgaagagcaaacatgctgcactagaaggaatcagtggctcattgtcactggcaaagccgaggcagtgggaggaccattttttctctgggttcagcaaccctcctagtggttagcagacagcagcataatggccagccagtgtgaaactgtgcaaattgcctcataaataactcgtaatgcacaggcaacagggagaggccatagctcatggataaatgactccctgccatttcggggtattaaaccagggataatccggacctcaccatggggattcattaactactatgggtttcccgcacgcaagcctgctgggactcaggcctgcttggtgcttcttgtggcatcatgatgggggcaaaacacttccaagcagggccatgagaaagagaatgtaagtacctttaacaaaccagccaggggtgaaccctgtaggagccaagtattttctctgtggaacttgctttctgaagaaatctctttgaagcgcagagaaaaacataataaccttaacaattaacatgtattgggcatttactctgtgccaggcactgtgctaagtctttttttttttttttttttttttgagatggagtctcgctctgtcgcccaggctggagtgcagtggtacgatcttggcttactgtaagctccaccagccgggtagctgggactacaggcgcctgccaccacacccggctaattattgtatttttagtagagatggggttttgccatgttggccaggctggacttgaactcctaacctcaggtgatctgcccaccttggcctcccaaagtgctgggattacaggcgtgagccaccgcacccctgtgctaaatcttgtgtaactcccacaaacattccattgagtggatactattattattagtcctattttcatagaggatgaagtgatagctcacagaggtttagttatttattttaggcaatatagccaatatgtggtgaatgcattagtcagcttttgttaggttgtggtaacaaatagtccaccagtctcagtggtttaaaatcacaagagtgttttgctcctattttatgccactcatggatcagctgctctcctttacctgactttattacaggatccaggctgaaatagtagcctctatctgggacatactattctcatggcagaagaagacaagagcaagaaaactggtggaactggccatggctgtgaaagcttctgctcagaatgggcatatatcacctctgctcacatttcattgatcaaaggtggtcatatggccaagccttctttcaatggggtgaggaagtttactcctcacactgggaggtactgcaatgaatgacaattggggagagatatctaagtctcttagaggaaaggcagagatcagagaatagtaatataatctatgcagctgagtgagatcagatctttgtggttttacattttgtgctcttaatttctgccctttgctgaatttggagttgggatacttgggcttgagcaccactctgcagtgagaaactctgtgactaagggcaatttatttccctctctgggtcccagtttccctgccttagttagatcccccagaagcagacgcagagacaaggaatgaaatgcaagtagtttatttgggaggtaataagaggaagccccagtaagaaaggaaaagtaagatagaaaaaagaaggaaggtaataaagtatgttaccaagcaggttaccctcagagcaaccagggcagaattctgctaaagaactgtggggatacacacctcagaattatcctacccgaggggtgaggaacctggaaatttacttaccaactcccaggccatcattggttgagggctatttctgagaccattgactcttctgcaaccagataaaagcctttggagcagagttataagtttttgtaataagcatcttttggcatacagaggtgagccaaagtccctatctatgcaatgggtggtgttggctagaaacacttcaatggctcttctactttttgtcccctgtgcctacagccctgcctggcatggggttagcatgtgggcagtctggttgagtgtgaggatcatgggcagttgcattttccctccatcttcctatgaaacctcatgccccaccactggctcttcctcttgcttttccactgcatgcaaaccttggctctgcaggatgttccatccaactcctgctcttcacaaatgtgtctcttacccaacgtgctgcagttcttactgcctgctcgcattgggcacactctttattcccggtactatgctttccatggtcacagggaggcagcatcaatgatgtcctcatttccctggcatctctcactctatgcaaaatatccttttgctttgcactctgccaccccctttgctgtcatctttgttccagtactaaccatcctcccctgaccctatcaagctccattcacctaaggctggctcccagcctccctccctctctgagctaccaaccaccttggcttctcccttgtctatggggttgatgcattccatacctacagttcttgtccctgcttagttcagaccacctacatctccctccacaactcaaaacaacctcttcaaccagtctcctactgcattcctacatacacttccaaacccctaaatttctgacttctagttcatcaatactttggccaagcattctctctaaaatatgattgggtagggaagtagccaaatgtagtagttaagaatgggaactcagagatagactgtcagggtttaaatcctagctctgccacttctttcttatgggaacttgggcaagccactcacactctctgtgcctcagtttcctcatctgccagatctacctcatagggttgttgccacagaccacctggcacataatgattagatcaccacctggcacacagtagttacggaatcactgtttgttaaatacattgaatttgcaggtgatgtctgttacctgcttcaaagcctccaaattcccagtcacccagagggtagagtctgagctgtccagtctggcacttgaggccctgggtagttggcctctacctccctttccaaaatcaacccctcagttcctttttaccccacattttatgactcagctgtttcatatctctgagtctttgcacgtgctgttccctttgcctggtatgctgagccctgtcttgttctgttcatttcctactgacttctcaggagtgccctcaggctttgcttcccctggagagcttccgggtctactcggatagagataattgccttcctccttgtagaaactgggcactgcccctgtttcagggctgagaccagagtgggatgagtgagtttgcttcaaaagtgaaatttaagggggcattcaaaaactcagtaatcaagagagaatatttgaatattaaaataaatcctgtgttagtttgctgaggatgattgtttccagctttattcatgtccctgcaaaggacatatattcattcttttttatggctgcatagtgttccatggtatatatgtgccacattgcatgttgtcactcataagtgggagttgaacaatgggaacacatggacacagggaggggaatatcacatactggggcctgtcggggggtggggagcaaggagatgtggagcattaggacaaatacctaatgcatgtggggcttaaaacctagttgatgggttgataggtgcagcagagcaccatgacacatgtatacctatgtaacaaacctgcatgttcagcacatgtatcccagaacttaaagtaaaattgaaataaacaataataaaatcagtgcaataagtctaggttgaaaagagcatcaacattttaaacaaagatgagatctaacctgttctcatgagactcatgccgcttgcctggcctgttggatcctgggctagcctgctggagattgaaagatcatgaggaggtgagcccagttgtgccagctgaggttattcaggttattctagactagtttacagccagctgacctcatacctgtcagagggcccagccaaggtcaacagagccacctacatgacccacagctgaagaagacacccgagcaagccccactgagctgtagacctgtagacctgtgtgcaataccaatacttatgattttcaactactacgtttggggatgatttgttacacagtggtagccaacaaatacacttcttctggccacagagcctttgagcatacttaacctctgcctggaaagatctctcttccctaggccccttcattccttaggccttcagctagtgctgctgctttagagaggcctttcctgacttcactatgtcaaagctccctcctccaggctctccttttactctgtaactctccatctttgcccttcactgcagttctactgcatttattcatgtgattgtctgatgtcagtctcacctgatagatggcaagctgcatcagggcaagaattatgctttttaggtctccattgcattttggcccatagttggtgtttgataaatgtgctgaatgaatacatgaatgaatgggtttattttgagacaaaatttgagagtgtggatcaagccccatgatttctctgccttttacccagtgacataatatgtaaaatggattctgatgcaaaggtcatgggcctctcctgggggcgcccctccacccctgtgcatcatagctcttctctcatcttctgagcagggtttgccagcagaacataaacaataatgtgaatggcactcttggagttgagcagccctgcactgagtgtagtggaagcacgtctggctaagccagggctagagtagtgcagatgggaggatgtggacatgacttgatgagggcagcagccagggatgggctaaaagggagggttggggggcctccctgaggccctctctctgattacctggtatcactcccttcacactgtaggcctccttctggcaatttaagattctgccccaggctctggtggccccgtggagcagaggatctgatgcctggtttcttgacctccatgtatcatgattcctaattcatccttgcttctcagtctgggaaggcaatataggctaagactgtggaccttcaagccacacccgcctgggttcaaatcccagcacagctttctactagctgtatagctttgggcaagtaatgtaactccttgcctgtaaaatgggctcatacctacattataggctgttatgagaatcaaactgagctggagtgggttaaagcacaatagtgcttgctacatggtacgtaggatatcagtgtttttgttttcctttgatttggctggcctgaggccctgatgtgaggctaatggtcccagcacatctaaccaggctgagcatcctgtttcttattggggagtgccatgtggctccaggttatgtcttaggtgagctctggtctctgttctttgaaaggcttgctttgcaggagaaatgtccttgggcaagaagccgctctggtggggctgtctcccagatacacacatgtgcatgtacacacacacacacacacacacacacacactcctgcgtagcccactccaaggcactctatgagcctttcactccttgttcagcctcatcaacaccttattataaaatccttttccagcactctgtccaaaggtcatcacaattataatcactgctgtaattatgtccaaactcgtagccccccactggggagtgtgggagcactgtcaccagcctaagaggcccagttctgtgaggcctgcttgtcccaccctgccacactgggaacagctatgctgtccccatagggatggcaatggtagtgaggcttgccctgtaccctcagagatgcttcctttattcaagccacctgtgccccacctatgccacccccctggagtgccctctattcccagggagggccctgcacagaggcaggtgggcgggtgtcacatgggtaggggaatgacagttttcctcacatcctccctgatgctcttcaggtgtctctcctgctgttcctgacgggagtgcaagctaagtgagagatgagacaggggttttgacaggaagggcctcactgggtggcaggatggaggtgagatccctgtgctgatgaacaggttatgttgtgtgttcatgcgacagaatcagacacatgctcattttgcaggttgtgcagagaggcctgtaatctccagagactcctcacctcaaagtgctttgcctattgttatggctgaaccgtgtcttcttaaaactcatgtgttaaagtcctaacccccaggacctcagaatgtgattacatactctgatgtagaatcttcaaagaggtaataactaaggttaaatgaggtcattaaagttcttctaggcaccttctagttttgagcaaccttaacatgagagtggcctgtgatgctcccggggcctcctctgcccaactcaccaagattggctagaaataggggttggagggaacctgggaagtgagccaacatttcttcttgtgctgtgatccgtgctattcctggtctcaaattctctttcccctccacattctgcagtgcctcactttgcctgtctgtgtgctgcttacatggatacccatatttttaggggataagcacattgacagggaatcagcagaatgcagtagaggcagggatggaggagaaaacagagcatgagcaggctgtgctgaaggggaaggttcacctgaaccccaggagatgctgggagccagtggtgggtctcacaggtgcctcaactttggcctgtggcccagtggggaagggtatgggggtctcccccatgtatggaaagtgccatgctggtggcttacccctgaggggcaccttccataccccatggctctgacacaatgtggcttctaagccaaacacctaaaaggtgtttagaagaaaagaagtctgtgttacgggcaatattgcacccctctgtaaggctttgccagccttagaagtctctgtagcagacctcatctgcagctagagacagaactgaaataggacgtagctgagatacctgggtgtaattccgggggacaccacccggtacaggggaaactttgaagacctaaatcttcttcagtagtttatatagtagttcatatggtctctatatagtcactgtcgtgtatatagtcaaagtgagaaactgagtggtgagactgtgactcacttttactcccagacaggtatggcctgaaattttggcaaatattaacaatggttataaaaacagctcattaggcatttgtgatgtacttagcaaatgcatgccccaggtaatgtgttaatgttttccatgcactaagacatttattaaccttcataacaactgtatgcaggagggttattagccgctttttaatagaggcttagagaggtttcagtcacttgtacaaggacagtgacccaggaagtgaagaaacttgtgccagtaagctcaatgtctagcttgaaagtccatgtgtgcaagctctttgcaatctctgttactgcaaagcctgcaaactgagctacagcatgtgggaggactcatagtccctaatgacactaatgtgcctaccatgtgccagcattacgcagtccacatagtttatttactcactgtgtaacaggcctcggaggcaggtaatcatagcctcattctggagatgcagaaactaagattcaaagagaataagtcacctgcttgtgaatagtacagttgggattcaagctcaggctgacacaaaagccccctctttttaggcttattttagttcgaataataagaagtgtgtgtgtgttgggtagtttgccctgagctcctgacagcctgtttgatttcagcgatttccagaaacacctgggagtacatgacggtaaggcaggatctgggcatcctgctggtgctgtggacagaggcttcctatagcagccctgagagtgcacacccagcccatgtgtgggagggcagagctggttctctctctgctttattgatgtggagtgagttgaaggttattgcaatgaataataaatgagctatcatagaggagccgattattccgaagtgttactgatgtttgtgttgataaaaatgaataaatggctaagtgtttgcagggaatggaagagaaaaggcataaagaggaaattcatatgtgcctctgatagttagaaacaatgagtcttgaagcagaggcaatcatggaatgggataaaacagctttgtgatttgttatgtagggaaaataatgacagaatctttcatctctggccatgttggctgcaaagtggcaatagacattggctttgaacagaggagataagagaccaagagaaaaaaaaagttcagaacagtgaataaaagagccaagttgtggcttggcttttctcccagagacagagacatatgaggaaggacagggctgcaaccatttcagcctctctgtagatagaagaagagggcctgactggccccaaatgggggtggaggggcttctcccaggattgaaagccaagatcacatgtaaaaagatcatgagaagtcaaattcaatggatgggggtcagccaggtgtggagtagctctttggtacagatgaccctactcccgggtacaattcctgtcaagctggccacaaattctcctctttctttactgctcagaaaaagcatatcagaatgcaacagagtgagaatgatgctatgtccatgattcccaaactctgtgctgagagcacctcagtaaacttagagggtgcaatgggatatttttttttcttttttttttattatactttaagttttagggtacatgtgcacattgtgcaggttagttacatatgtatacatgtgccatgctggtgcactgcacccactaactcgtcatctagcattaggtatatctcccaatgctatccctccccctccccccaccccacaacagtccccagagtgtgatattccccttcctgtgtccatgtgatctcattgttcaattcctacctatgagtgagaatatgcggtgtttggttttttgttcttgcgatagtttactgagaatgatgttttccaatttcatccatgtccctacaaaggacatgaactcatcattttttacggctgcatagaattccatggtgtatatgtgccacattttcttaatccagtctatcattgttggacatttgggttggttccaagtctttgctattgtgaataatgccgcagtaaatatacctgtgcatgtgtctttatagcagcatgatttatagtcctttgggtatatacccagtaatgggatggctgggtcaaatggtatttccagttctagatccctgaggaattgccacactgacttccacaacggttgaactagtttacagtcccaccaacagtgtaaaagtgttcctatttctccacatcctctccagcacctgttgtttcctgactttttaatgattgccattctaactggtgtgagatagtatctcattgtggttttgatttgcatttctctgatgggcagtgatgatgagcattttttcatgtgttttttggctgcataaatgtcttcttttgagaagtgtctgttcatgttctttgcccactttttgatggggttgtttgtttttttcttgtaaatttgtttgagttcattgtagattctggatattagcactttgtcagatgagtaggttgcaaaaattttctcccattttgtaggttgcctcttcactgtgatggtagtttcttttgctgtgcagaagctctttagtttaattagatcccatttgtcaattgcaatgggatatttttaacgtttggagggaaacttgatatcctccggacatcacggtaataccagctctgctaatacagtttcaactttaggttaagctacgttccttttgatgacatcatgtctttgcaaacagaggcttttagtcattgctgtggttaaaataaagtatggtatgtaaaccactgtagagcaggcaatgaagatcatggtgtctaatctgattccaaggtttaagaagttgtgtagtgcccaacaaatatacagatcccattattaagtaattatagttatttcagaatgaaataaaaatattttttaaatcaatttatgtgattgttttttgacacataattatacatatttatggagtacagtgagattttcaatacatgtatacattgcataatgatgaaatcagggtatctagcatttccatcatctcaaacattcatcatttctttgtggtgagaagattcaaaaatcctcttttctagctactttgaaatacagcatatgacattgttaaccataaccaccctctgggaaatagcacaccagaacttatttctcctatctgtgactctctactcattaacctatctctcccttcttctcttccttctaccttccccaatttctggtaaccactattctgcttcctgcttctatgagatcagcttttttagatgctgcatatgagtgatatcatgcagtatttatctttctgtttctggctcacatcacttaacacaatattctccaggttcatccacgttgccacaagtggcaggattttattcttttttttatggctgaaatgtattccattgagtatatataccacattacaaaaaatccatctgtctattgatggacacttgggttgattccatatcttgactattgtgaatagtgctgcagtaaacacgggagtgcagctatctcttcgatactctgatttcctttcttttaggtatatacccagtaatgggatttctggatcacatggtagttctattttaattttttgaggaacggcccactgttttccatggttgctgtactaacttgctgtttcatcagcagtgtataagttctttcttgagatccttgccagcatttgttatcttttgtctttttgatgatagccattctaactggggtaaagtgatatctcattgtgattttaatttcatctccctaatgattagtagtgttgaacattttttcatatacctgttggtcatttgtacgtcttcttttgagagatgcctgttcagattttttgaccggtttttttttttttttttttttttttttaagatggagtcttgctctgtcacctagactggagtgcagcggcaccatcttggctcactgcaacctccacctcctgggttcaagcaattctcctgcctcagcctcccgagtagctgggattacagacacacgccaccatgcccgggtaatttttgtatttttagtagagactaggtttcaccatattggccaggctggtctcaaactcctgacctcatatgatccacccacctcgacctcccaaagtgctgggattacaggcgtgagccaccacacccagccctttttgcccatttttaaattggatgttgttttttggcttttgaggtttttgcattacttatatatacttgatattaacccttatcagatgtgtagtttgcaaatatttctatagttttcctcttcactgtgtcgattgttttctttgctgtgcagaagctttgtattttgatgaaatctcatttgtctatttttgcttttgttgcctgtgcttttgtgttcttgacaaaaaaatctttgcccagactaatgtcatggaggatttattctaatagcttatagttttaggatctacatttaagtctttaatccattttgagttgatttttgtatatggtgagaaatagggtctagtctcattcttctgcatgtgaatatccagctttcccagcaccatttgttgagtggttctttctccaatgtgtgttcttggcacttttatcaatcagttgctgtaagtacgtaggtttatttctgggttctccattctgttccattagtctgtgcatctatttttgtgccagtaccatgctatttggttactatagctttgttgtatattttgaagacaggaagtgtaatgactccagctttgttctttttgctccagattgctttggctatttaggatcttttgtggttccatatacattttaggattgttcaatatacgttttaggacttttatatttcagtgaagtacatcattggtattttgatagggattacactggatgtgtagattgctttgggtagtatgaacattttaaacaatattctatcaatccatgaacatggatgtctttatatatgttttcttcaggttttcatcaatgttttatagttttcattgtaaagctttttcacctccttggttaaactcattcctaggtgggaggctgaggtgggatgatcacttcagcccaggagtttgagactagcctgggcaacatagtgagacttccacttctacaatttttttttaaattacctgggcacggtggagtgtgcctgtaatgttagctacttaggaggctgagatgggagggtcacttgagtctgtgatgttgagactgcaatgagccgtgatggtgccattgcactccagcctgggtggcagagcaagaccctgactaaaaaaaaattcctaggtgttatttttgtggtgattataaatgggattgatttcttgatttttttctggatagttcactattggtgtatagaaacactatatgtgcattgtttaaaaaatcagctactgttaggacatacttattaaattgtttagctctaactaaagatgaggtatttctgttaatcatgaacatgaaaaaaattgtggagacactaaggatcctgtcaacagggaaagtgggggggaacttctgttaggtcctagcaggaaaccaatggcacactcaaactggataatttaaagagagtttgagaaaggaatttttttcaaagatgtgggaaaggtatagagaaatcacaaggaataggcagtatcctgaggttagtactggggagagggaattggaaaagttgggaggaaaaaagagggtgggagggaagaagtggttattacaacctgtagatcatgctgtggagagaggcctgtctcacagtagtaaagagcttcagctcagcaacatggtcagcttcagttcttggcatagagatctgggaaaagaggtgccctgacctcactcttatccttccctctctcccagtttctgcaggtgttccccactggccaagcccaggagagggcaagggagcctcttgacataaccacaggacttagcttccctggtacaaaagaaggtggaagactagtcctggaagggcaaccaggagcaatccaatatattatgatacagctaaatttgaatctgctgttgcttatacaaagaatagtgaatccttctcaagcttcagaatcaataagaacacgcatttatcaagcactttactgtgtgctctgctgagttaagcactttacaggcattatctcatttaatccataaacaaccttaccaagtagattctattgttcactccaaaatggaagatagaacaaatacatggcagcattgctgtgaagaggagagaaaatgaggaggagagaaaatgcatcaaggtaacttccttcatgtacatagtgggctcagtcaatggaaaaaaaaaattttgtttgcttttttgagacagaatctcactctgttgcccaagcttgagtgcagtggtgcaatttcggctcactgcaacctccacctcctgggttctggcgattcttgtgcctcagcctaccagtagctgggaccacagacatgtgctgccatgcccagctaatttttttttttttttttttttttttttttttttttttttttagtagatacagggttttaccatgttggccagactagtctcaaactcctggcctcaagtgatctgaccaccttggcctcccaaagtgctgtgattccaggtgtgagctaccatgcctggccatcaatggaaatattttttgctataatttttttttttattaaaaaatctttccaatagggaagaaaaagtgttggccaactaacataaaggtatttctttccttggcacttccatttcccagtcaaaattcacaaaatggcctctggctcttgcgagttagatgagtggtcattaacattctggattcctccagaatccagttacttttgtgtttcccattctgcagtgtggtggatgaaaccaatgccatggtggcctcaccaaggtgccacatcccacagagaccaggctgcaacactggcttgtcatagttatgccatggtggctctcaaaggatccccacggggaacaccaaaatcacatcatggtggccttttccctactcatcaataacatcaaggtcttgggatagaactttctcaattctaactttttcttccataaattttctttaaactgagccaaaaatgaatgaacaataaacattaatgggaaattttaaaatgtgatttttaaaggagtgttttatgtattgttacttttttgagatgcagaaacctgcatgcatataatatagccatattttctggtagtaaagttgttgctgactcgtgtgacagaattaagtgcatcaattttttcttgtggttatgcagaaagcatcccatcttcccaatgtctgaaagaatttgaaactactttgatagaaaaacttgcatatggtataaaatttaggctctaggaacattgtgagcattaccactatcatcatcatcactgtcatcatcacctctgtcatcattatgaagatcatttctttccaagggaatcaaaatgtgtcctctgtgtgtcttcgctacattatattaagcagtggttctcaaagtgaggcttctggaccaagcagtgtcagcaaatgcaaattcctaggccttaccttagaaaaactgaatcagaatctctgggcatggagcccagcaatctgtgttttgataaagcctccaggttgagaaccattgttttttagtaattcttacacaagccagtgagataggagccactgtttccatttcagtgctatgaaaacaaagggtgagagaatattgcagttattaaatggtgagactagagcatggattgaattcttccacctctaggatgagtccttatcccaacatcactcttatatacataactaatgaatcaggaaactgtgcgtccactcttttgtggaagatatattaataggtaaggcacagttgccagaacttactctcttaagaagataaggcaggaaacgcttagcaattaaatgctaagtggcatcatttccaatgtcataggtttttggtgatgaaagaggtcactgtgggctggactgagtggtgtcccctggaattgttcaaagtactccaagttgctaagatcttgatcaaatatctctagaaataagtggtcttcagttaggtctggaaggacaaagtggatctggctggctggtggaggaggaggaggtcaatagttgattagcaaatggacaagaagggtgtgactttctattgttaaaacaggttaaagctgagaagcagcagccagcaaaagccttgactgaaagatgagcaccttgagacctcttactgcaaaataaattctgtagattgcatctccacctgttggttgggatactgattctattccactatgaggaggtagccatttccttcctagcccctctccaatttactgctagaccaggggtggcaaaccttttctataaagggccaggcagtaaacattttggtctttgcgatccatatggtctgtgttgcaacctgtcaactctgctactgtatgaaagcagccatgggcaatatgtaaattgatgggcatggccgtgttctaataaaactatatttgtggacactgaaatttgaattttacatacttttcacgtgtcacaaaatattcttttgattttttttcaacaatttcagtgtaaaacccattcttagcttgtgggtcatataaaaactggtggcaggccagatttggcctataggctatagtcagctgatccttgtactagaccataaaccttacaaggatagaatcttttctgctcactatcatatacccaggacctgtcgcagtgcctcatacacagtggccactcaaaaaaaatctgttgaatgaatgaatgaatgaatgaatacagtctgtctattctcctttgtttcctcttctctgaatttgtccaaagaaaatatgaggtaaggaagctgagaaagagtaatcagaaggtatccaatgccttctcttgtctacatcttaggtaggaattcacaaagcttctgattttagtgaaaagaaagattaaataaaagtctctgtaagggctttagttgtcaatctgccctgaagttcagaaatactaaactcagagctcaaatatgccaagaatgtttttttttttaagcctaagaataaatctagaattataaagttgtttcctacttaaccccagagggtacactgagattaagtataattgtttatagttgtgagttagtaaggatgtgttcataatgcaaagaactgcgtggttttaaatgttctaagttgtgcattactttaaaaatatatggtaacgagatatgaataattggtgtttggtgaggttgaagtttctgtaaaatgtatttcaggctgtgcattggagctgtaaaagtgcaacactgacaccttccatgaaaaaccaggcgggtgctggaggccataactgagacagtgttgagcatggaggaacaggtcatgtcaatgagctttaaccaataaagcatcttggaaacatctgagaaatcaaaaatatgacttgcaaagggtgattatatacatggggaggataactaggaaagagcctcaaaggctagaccttccttctgggataggggaggaggatatatgccctttgggaagagaacagagctagctaggcacttcagatcagagctgtgggtgctaacaactaatttgtgctggttgaaacttaccattgtccaagaccttccctttctgggtcattcttaacaattactattatactttaataattcaatatagagtatttatatatatgtgtgtatatatatatatatatatatatatatatatatatatataactttttaaatagagcttaactggatggagacattcactgtgttgctgaaatcccttttattcagaccatgattccgttattgtttattttttctgcttttccagcactcattacctccttcattgtaatgggggcgggcctcatccctctgcctctttccatttaactgaggcggctctcaccctctggaccaggcaagggcacatgatcttgggctagccaatcaaaacatttcattcttctagccatagtgattggttcaggaatgagcatatgacctaagctagaccaatgagaaccattcccaggtctttcctgagcccactgattaagtagttaagcttctaggctgctaactggaagcttctgttggtgacttccttgagggaggattttttttttttttttttttttttgagacagagtcttgcactgtcacccaggctagagtgcagtggcatgatcttggctcactgcaacctccgcctcctgggttcaagtgattctcctgcctcagcctcccgagtagctgggattatagacatgtaccaccatgccccgctaatttttgtatttttagtagagacggggtttcaccatgttggccaggctggtcttgaactcctgacctcgtgatccacctgccttggcctcccaaagtgctgggattacaggcctgagccaccgcgcctggcctgagggaaggacctcttgagaagggaggtatcacaaagatggccactgccaatttaccttcccttgtggatcttttgctttctaatcttcgctgtggtggggaataatctctactcaaagtgtttggtggattacatgaaaaatacacagcaggtatttggaagcatttccatcttcctttcttccttctttcctctttttctcctatctctcttttcttccctccctccttccttctccccaaccttaccttcctttcaaggaactttccccaaagggagattatttaggtacaggcttggcaactttttcccagtgacttctcttccatgggactggggcagccacggggcagtttcttgaaggcttcagtgaaggtgagatttgtagggcttttgtgatcacctggaggatgcagggctgagattggtagagggtggaggttaaaggagcagatcctttttggccatgaaaaagaactttctaaccaaagcatttttcaataaaggcaagagcatcttaggtggtgtttccaacctggggcatccagccaaggattaatggccatctctcagtgtattaggattctccagagaaacagaatcaatataatatgtttgtgtggatgtattttaaaaactaatttattttaaggaattgactcacatgattgtggaagctggcaagcccaaaacctatagagtaggctggcaggttccaggctaccctggcacccagggaatagttgatatggcagcttgagtttgaagacagtctggaggcagaatttcttcttccccagggtaccacaatctgttttttcttaaggccttcaactgattggatgaggcccacttacattacagaaggtaacctgctttactcaaggtctactgatttaaatgtaaatctcatctgaaaaataccttcacagtaacatccagactgatgtttgaccaaacgtctgcgtactgtggactaaccaggttaacatataaaattaaccatcatgagtctacccttgtcaacttcgtgcccattcacatttctgtaagtcattttaatctccaaatagagacaataacaagattatgcttctgcctaacatgatacaaccgtcctgtgtgcaactgaaaacatgctaaccctttctccggaaaatacaaagtctttgagtgatacttttcttcatgatatcccgtagcttaagtactatgatgtaaagttaacaatacgtaaataccgtgatataaagtcaacacgttacatgacaaggggagaaaaaagggaagaaaacaaagatatttgcttcttacatacatgcaaactttccataaaaaataaggaataaaaactcatgataattatgtttcccatttctatagctggtcacagctggtgtttataactaccttcttctgtccgttctgtatttcctttgcccttgacaagcacctcagctagttgtggcttttgacttgctggggtgactctaaccttcatttctgaagggtccaggtcattagtcctaggatggggttgttacagttttgcactgactttaatcacaaggcatgataatactaagtgatgctctcaggaatctcttatattccaaacacactcttccttacctacattgtggaatagcagtccgatttccccttggtagtcaggattaatcagcccagccagcatagtaactttcttacttgctgttgcttcagaggcaggagaatcccagagtagcggttttaacttctagttcaacaggattgttgggtctcctgatgaaagtgttcctccccttagaaccaggacctctaggccagcatagcataaggttgcagaaacaagcaaaaattttgatagtgggtcactaggggaaatcgtgagtggcgtcactctcattcccactcctggattcctgaacccatgaattctggctatgggagaaacagcaccatatattggacactgattcagagcttctacagcctcctggggaaccctgccctagccttgcaaggtattgtcacctagctggggctgtaactaaaccttcaaaagttcattctactattctgtcaagccaactgcattagaatggtgggaaacatggttaaaccagtgaatttcatgagtgtgggaagtgagttccctgatcagaagcagtgctgcgtggaacaccatgatggtggatgatacatcctgtaaacccatggatggtagttttggcagaagcactgcatgtagggaaggcaaatttgtatcaaaaataagtttctattccaataagaaacaattctgcctcttctgtggtggaaggggttcagtgtaatcagcctgtcaccaggtagctggctgatctccctgggaaatgatgccatctggggagtcagtgttggtctctgttgctggcagactgggtatgcagtgatagccatagccaggttagtcttaccgagtggaagtccatgttgctaggtctgtgcgtgacctccatctctgctaccatgaccacttagttcatgagcctgttgggcaatatcaggggtgtcttgggaaagaggctgactagtagccacaaaatgggttatccaatccacttgactattacaatcttcgtctgctgaggccactgtttgatgagtattcaaatgggacataattcctttaacattttttgccaatccagagaggtctatccacatacctcttctccagaccttgtcctattttccaatcatggtcaagtcccttaccttatagcgaaaccattggtcacagcccatgaatcagtacccagccacacatctgactatttctttttccaagtgaaatgaacaaccacgtgtgctgcttgaagttctgcccactgagagaatttctcttcaccactgtgcttcagggatgtcccagagtggggctgtagcactgctgctgtccatttccaagtgatgcctgcatatcgtgcagaaccatctgtaaatcaggattattttctttttctctgtgaagggatcctatggaactccccatgagacacactcacattatggagggtaatctgctttactcacagtctgatttaaatgttaatctcatctaaaatacctattcacaacaacatccagacttatatttgcccaaatatctgggtaccatggcccagccaaggtgacaaataaaattaaccatcacgatcagggatgcaatagagggggcttctgttcagggaggcagtctggactaagcttccaagaggacttctggcttgcaaattgcaatctctgatttgttcagctaatgctaccgccaggtgctcctcccttcagtgtggacctagaaaaggtattctttctctatggcagtggttcttaagctcttcagtgcatgagaatcacctgaaggacttgttgaaacaccaattgtggggctgcatcatgaatttctgatttagcagtttggggatgagcctccaaatctgcatttgtaacacattcccaggggttgctgatgccgctggcccagggaccactctttgagaacccctctcctatgggttcactaatttcatgaatgataactggtgtattgttgaaaaagcaccaggctaggagataggagacctgagttcttgccacttgctacttcatctagctgtgagtatgtgggcaagtcacttgccctctctgggctttcctcatccctaaaaagagacaagtcactggtgtctatctttttaggacagtgggcctccttcaatcagctttccttttggtgggcaccatgattttgagggattattttttccccagaaatacaatgtgtatttaaatagtagcctgggtagactgatttatggcaaatacctaattttctttggtcttttttgaaataaaaacagtagctcagggatctctgcatccataaccactaaattaaatgatatttacaatttcctctcatagctcaaagaatgtgacgttcgagaacaatcaggacacaatgccaagccttaacttttgggatgattatgagctttggtgcctgctgaggttgccaatagcttgttgaggatgctgtctggggcatttcaggttattagctgggaatttgactacgtggctttcgaggtttcttagctctaagaccatggttttcggcccccacagactcttccaggtcatcccttggggcccacagttgagagtttagagttggtgctaattcaaaggttttagggttcatcttccaggcatgttcttcaggaggagcattagcgtctcaaagagattaacgagttaaatgagtgtaggtgcttcctgttagacttttgttaagcagaatgagctcagatgtgtcctatgttgataaatatatcacctgagcctcacacacccagaagggatgactgctgaacatctgggcctctgctagctgctggaatccctgcctatgctggttggcaacacctctgtactcacatcttttccagctaagtgaacggttagcttatgctaaaaacacgtgtgagtgtgatcatttgtgtgcaacgcatggagtcgaaccgctaccatttggtagggtgggggaggggaaggttgctgttttgaatatgcttttctttgaaagcatgaaaaaccaaatgtgtctgtgaattggagtacattttagagactttccctatacattcaagttcataagatccttttttatacaagtgttttctaagcactaactgcctcccaggttcaatgtgaactcctgagaaaatgtcattttggccccagttcctcacagttgagcaaggcagccagtctaaacagacattaacggaaatgcagaaagctaaagtggggactgatgaggaagaaaattacctccctgggggctgtcaggaaaagctgctcttcagaccagctaaatagctaactttgggactgatacaagcaaggtaagcctttcaaatgggaaaatcaatggatgttttaatgctggctctttgaaggatgtggtactcaccaagccaaggaggggagcatttccagcagagggagcagcatgtacaaaccgccagttgttttggatgggtcaagaagccgtgtagctgagtatggagggaagctggggtaggtgagagtgagcacaggaaatcaggaaaatcaagaccacactgcagcatttcttttgtgtcatgctacagatgtgtcatactagagagcagtgattctcaaacttgagcatgcatcagaatcactgagagggctgtggacacccagattgctgggtcccatctcgagagcttctgattcagtaggttagaaaacatgcacttctggctgggcatggtggctcacgcctgtaatcccagcactttgggaggccgaggcaggcagatcacttgaggccaggagtttgagacaagctttgccaacatggtaaaaccccgtctctactaaaaatacaaaatagcagctgggcatggtggttcatgcctgtggtcccggctacttgggaggctgagacatgagaattacttgaacctggcaggcagaggttgcagtgtgcccagattgcaccactgcactccagcctgggcgacagagtgaggctctgcctcaaaaagcaaaaacaaaaaaaagcaaaaaccatgcatttctaactgcccagatgatgatgatgctagtttagggaccatacttagagaatcactgtttatagagtttggatctctgagcaatagagtattcctgagaattttctaagaaggagtattacaaagtcagacatgcattttggaagaagcattatgaagaaattgtggcaaccatgctggagtgggtagtcaggggacgggcaggtcagttacacagtggttgaaatggttgaagcaactgagaatgggtgaggcctgaactaggtggtttaaaagtgtgagaggtgctgggttttcagcctggagtgtgggctccatcttatcagcctattctggcattgagtttcgccctcctggcctagtgagtcattctgcaggtgggatcactgaggctttgagtcacgtgccaggtcattcaaaaggcaaagcactgtctctcaatgagaggcaaaagatagtatttttacccaaattctgcaggatgatctattgtggttttcattttctcagcacattttattcaattttactaggtcatttagcaaataattttaattttctgcttagatcagaatttcagaaagtaatgtactgttgtactattaatgggtcctctaataagctccactagaatgcaatttgcaaatcattcacaaacataactgtcactctgcctggttgtcaattaacacactcctctgtcattctccttgagagggcccagagatttctgggagactcctgtacctggctgggcctcccgtgagcctctgtgaaaggggaaagcagataagggagtcagaactcatttcaatgttgagctgtggcacctgctgcattcttgtttcccactgcggggcagctggttcctaatctcaaaactgaatcgcaccttgggttgcatggatcaagtaattgtaacaacttagcaggttaaacatccaggcatgtggggatttcagctgcaggatggtggtggatgaagagtaggagaaggagcaaaatttactaaacacagctttatgccaaaactgcattaggacattctttttattgatattatttttaatacaaataatacattaatacaagtttttttggcaatttattttagcaataaataatttgcctcttactctgctaacaagttaaaacaggggttggcaaactatgtccataggacaaatctatcccacagagtgtttctgtaagtaaagtttcattggaacacagccacatcctttcagttacacattatctatggctgctttcctcctgcaattgcaaagttgaatagttgtgacaaagcctcacgaagctgaaaatatttgctgtgtggttcatatatatatatatatatatatatatatatatatatttttttttttttttttatattatacttcaagttctagggtacatgtgcacaacgtgcaggtttgttacatatgtatacgtgtgccatgttggtgtgctgcacccattaacttgtcatttatattaggtatatctcctaatactatccctccccgctccccccaccccacaacaggccccggtgtgtgatgttccgcttcctgtgtccaagtgttctcattgttcagttcccacctatgagtgtgaacatgcagtgtttggttttttctccttgcgatagtttgctgagaatgatcgtttccagcttcatccatgtccctacaaaggacatgaactcatcattttttatggctgcatagtattccatggtgtatatgtgccacattttcttaatccagtctatcgttgttggacatttgggttggttccaaatctttgtgattgtgaatagtgctgcaataaacatacgtgtgcatgtgtctttatagcagcatgatttataatcctttgggtatatacccagtaatgggatggctgggtcaaatggtatttctagttctagatccttgagcaattgccacactgacttccacaatggttgaagtagtttacagtcccaccaacagtgtaaaagtgttcctatttctccacatcctctccagcacctgttgtttcctgactttttaatgattgccattctaactggtgtgagatggtatctcattgtgattttgatttgcatttctctgatggccagtgatgatgagcattttttcatgtgttttttggctgcataaatgtcttcttttgagaagtgtctgttcatatccttcacccactttttgatggggttgtttttttcttgtaaatttgttagagttctttgtagattctggatattagccctttgtcagatgagtagattgtaaaaattttctcccattctgtaggttgcctgttcactctgatggtagtttcttttgctgtgcagaagctcttaagtttaattagatcccatttgtcaatgttggcttttgttgccattgcttttggtgtttttgagatgaagtccttgcccatgcctatgtcctgaatggtattgcctaggttttcttctagggttcttatggttttaggtctaacgtgtaagtctttaatccatcttgaattaatttttgtataaggtgtaaggaagggatctagtttcagctttctacttatggctagcctgttttcccagcaccatttgttgaataggaaatcctttccccatttcttgtttttgtcaggtttgtcaaagatcagatagttgtagatggctattatttctgaggtctctgttctgttccattggtctatatctctgttttggtaccagtaccgtgctgttttggttactgtagacttgtagtatagtttgaagtcaggtagcgtgatgcctccaactttgttcttttggcttaggattgacttggcaatgtgggctctgttttggttccatatgaactttaaagtagttttttccaattctgtgaggaaagtcattggtagcttgatggggatggcattgaatctataaattaccttgggcagtatggccattttcacgatattgattcttcctatccatgagcatggaatgttcttccatttgtttgtgtcctcttttattttgttgagcagtggtttgtagttctccttgaagaggtccttcacatcccttgtaaattggattcctaggtattttattctctttgaagcaattgtgaatgggagttcactcatgatttggctttctgtttgtctgttattggtgtacaagaatgcttgtgatttttgcacattgattttgtatactgagactttgctgaagttgcttatcagcttaaggagattttgggctgagatgatggggttttctaaatatacaatcacatcatctgcaagcagggacaatttgatttcctattttcctaattgaataccctttatttctttctcctgcctgattgccctggccagaacttccaacactgttgaataggagtggtgagagatggcatccctgtcttgtgccagttttcaaagggaatgcttccagtttttgcccattcagtatgatattggctgtggatttgtcataaatagctcttattattttgaggtatgtcccaccaatacctaagttattgcatgaagggctgttgaattttgtcaaaggccttttctgcatctattgagataatcatgtggtttttgtctttggttctctttatatgttagattacatttattgatttgtgtatgttgaatcagccttgcatcccagggatgaagcccacttgatcacagtggataagctttttgatgtgctgctggatttggtttgccagtattttactgaggatttttgcatcaatgttcttcagggatattggtctaaaattctctttttttgttgtgtctctgccaggctttggtatcaggatgatgctggcctcataaaatgagttagggaggattccttctttttctgttgattggaatagtttcagaaggaatggtaccaactcctccttgtacctctggtagaattcggctgtgaatccgtctggtcctggactttttttggttggtaagctattaattattgcctcaatttcagatcctgttattggtctattcagagattcaacttcttcttggtttagtcttgggagggtgtatgtgttcaggaatttatccatttcttctagatattctagtttgtttgcgtagaggtgtttgtagtattctctgatggttgtttgtatttctgtgggattggtggtgatatcccctttatcattgtttattgcatctatttgcctcttttcttctttattagtcttgctagcggtctatcaattttgttgatcttttcaaaaaccagctcctggattcattgatttttttggaggattttttgtgtctctatctccttcagttctgctctgatcttagttatttgttgccctctgttagcttttgaatgtgtttgctcttgcttctctagttcttttaattgtgatgttagggtgtcaattttagatctttcctgctttctcttgtgggcatttagtactataaatttccctttacacactgctttaaatgtgtcccagagattctggtatgttgtgtctttgttctcgtttgtttcaaagaacatctttatttctgccttcatttcgttatgtacccagtagtcattcaggagcaggatgttcagtttccatgtagttgagcggttttgagtgagtttcttaatcctgagttctagtttgattgcactatggtctgagagacagtttgttataatttctgttcttttacatttgctgaggagtgctttacttccaactatgtggtcaattttggaataggtgtggtgtggtgctgagaagaatgtatattctgttgattcggggtggagagttctgtagttgtctattaggtccgcttggtgtagagctgagttcaattcctggatatccttgttaactttctgtctcgttgatctgtctaatgttgacagtggggtgttaaagtctcccattattattgtgtgggaggctaagtctctttctaggtctctaaggacttgctttatgaatctgggtgctcctgtattggatgcatatatatttaggatagttagctctttttgttgaattgatccctttaccattatgtaatggccttctttgtctcttttgatgtttgttggtttaaaatccattttatcagagactaggattgcaacccctgcctttttttgttttccatttgcttggtagatcttcctccatccctttattttgagcctatgtgtgtctctgcacgtgagatggttttcctgaatacagcacactgatgggtcttgactctttccaatttgccagtctgtgtcttttaattggagcatttagcccatttacatttaaggttaatattgttatgtgtgaatttgatcctgtcattatgatattagctggttattttgctcgttagttgatgcagtttcttcctagcatcgatggtctttacaatttggcatgtttttgcagtggctggtaccagttgttcctttccatgtttagtgcttccttcaggagctgttttagggcaggcctggtggtgacaaaatctctcagcagttgcttgtctgtaaagtattttatttctccttcacttatgaagcttagtttggctggatatgaatttctggtttgaaaattcttttctttaagaatgttgaatattggtccccactctcttctggcttgtagagtttctgccgagagatcagctgttagtctgatgggcttccctttgtgggtaacccgacctttctctctggctgcctttaacatgttttccttcatttcaactttggtgaatctgacaattatgtgtcttgaagttgctcttctcagggagtatctttgtggcgttctctgtatttcttgaattttaatgttggcctgcctcgctaggttggggaagttctcctggataatatcctgaagagtgttttccaacttggttccattctccccgtcactttcaggtacaccaatcagacgtagatttggtctttgcacatagtctcatattccttggaggctttgttcgtttcttttttctctaaacttctcttttcacttcatttcattcatttgatcttcagtggctgataccctttcttccagttgattgaattggctgctgaagcttgtgcattcatcatgtagttcttgtgccatggttttcagctccatcaagtcctttaaggacttctctgcattggttattctagttagccattcatctaatcttttttcaaggcttttaacttctttgcgatgggttcgaacttcctcctttagcttggggaagtttgatcttctgaagccttcttctctcagctcgtcaaagtcattctctgtccagctttgttccattgctggtgagcagctgcgttcctttggaggaggagaggcactctgatttttagaattttcagtttttctgctctgttttttccccatctttgtggttttatctacctttggtctttgatgatggtgacgtacagatggggttttggtgtggatgtcctttttgtttgttagttttccttctaacagtcaggatcctcagctgcaggtctgttggagttttctggaggtccacaccagaccctgtttgcctgggtatcagcagcggagactgcagaacagcgaatattgcagaacagcaaatgttgctgcctgatcgttcctctgcaagtttcctctcagaggcgtacccggccgtgtgaggtgtcagtctgcccctactggggggtgcctcccagttaggctacttgggggtcagggaaccacttgaggaggcagtctgtaccttctcagatctcaaactctgtgctgggagaaccactactctcttcaaagctgtcagacagggacatttaagtctgcagaggtttctgctgccttttgttcagctatgccctgcccccagaggtggagtctacagaggcaggcgggcctccttgagctgtggtgggctccacccagtttgagctaccccgcagctttgtttacctactcaagcctcagcaatggtgggtgcccctcccccagcctctctgccaccttgcagctcaatctcagactgctgtgctagcaatgagggaggctccgtcggcatgggaccctccgagccatgcgtgggatataatctcctggtgtgccgtttgctaaggccattggaaaagtgcagtagggtgggagtgacctgattttccaggtgccttccatcacagctttgcttggctaggaaagggaattccctaccccttgtgcttcccaggtgaggcaatgccccgccctgcttcggctcacgcttggcgggctgcacccactgtcctgcaccactgtctgacaagacccagtgagatggacctggtacctcagttggaaatgcagaaatcacccgtcttctgcgttgctcatgctgcgagctgtagactggagctgttcctattcggccatcttggaacccatctctgctatgtggttcttaatggaagttcgcctagttaaggatatggactctcaaattttttatactaatttatatagcagacgtattcacagactctatttcattttgtatataattgggattacaccatatgcatttttctgagacggtttttttcctttcgattatatgccttggggatcattccatggtagaatattattttatttatttatattttgtggctacataggaagttatattgtaaatatcttataatttatgctttcttttttgtatttttgtcaattatcttcattgttttttaaaataactatcttattttggaataattttagatttacagaaaatttgcaaagaggaaacagtttctatacccatgtcacccagtttctcctaatcgttaacagcttattttaccatggtatatttgtcatactaagaaaccaacattggtactatttattcatttttaattatacaagtaacgcatacaaaaatctttctctttgtgaaaataggcagaataggttcaaattccctttgccctgccatcctaatctcaggacctttattccaatccctgccccaactctatttggtatttatccttccaggcttgtggtagtccattttgtattgctctaaaggaatacctgagactgggtaatttacaaagaaaaggggtttatttggctcacagttctaccgtctttatgagaagcatggcatctgcttctggtggggtctcagaaaacttggactcatgacagaaggcaaacaggtagttggcatatcgcatggcaagagggggagcaagagagaggggaggaggtgccaagcttatttatttatttatttattattatactttaagttctggggtatatgtgcagaacatgcaggtttgttacataggtatacacgtgcgatgatggtttgctgcaccccatcaacccgtcatctgcattaggtatttctcctaatgctatccctcccctaggcccccaccccctgacaggccccggtgtgtgatgttctcctccctgtgtccatgtgttctcattgttcaactcccaattatgagtgagaacatgcggtgtttggttttctgtttggtttgtgttagtttgctgagaatgatgatttccagcttcatccatgtccctacaaaggacatgaacccatccttttttatggctgcatagtattccatggtgtatatgtgccccattttctttagcccgtctaacattgatgggcatttgggttggttccaagtctttgctatggtgaacagtgctgcaataaacatacgttaaccccatgccaggctttttttttttttttgagacagagtctctctctgtcacccaggctggagtgcagtggtgcagtcttggctcactgcaaactccgcctccaagctctgcctcctgggttcatgccattctcctgcctcagcttcccaagtagctgggactacaggtgcctgccaccatgcccggctaattttttgcatttttagtagagacggggtttcaccatgttagccaggatggtcttgatctcctgacctcgtgatctgcctgccttggcctccaaaagtgctgggattacaggcatgagccactgcacctggcttgccaggctcttttaaacaaccaccttttgtttggacaaatgaagtgggagctcacttgttactgcaaggacagcaccaagacatccacgagggatccgcccccctgctccaaacacctcccagtaggtctcacttccaacattggggatcacatttcaacatgagatttggagagaacacacatccaaacagcatcagggcttttctataagcattcactacacacacaaacacacgttggcaatattgaaagtacaatcttttttgtggtttaaaaatataaacagtatgcatttttctcttcaacttgtttgtttgagatgggcttttggggaaaggatgaggcttgtgtggtgagctcaagacacatgcgctgacattatcttagtgtccctgatgtttggtgagtgggatgcaattacaggagtcttgaaattgaggctgtacacagagtcaggcgtggtggctgagctatgaatctgggctgggctgccatttggtttagagaaatttccagtgactgggagaggggattgtaccaggtctaaggcctacctacaagcagaggggctggtaaaggaagttcaggcactttggggagtgaaggcccagggaaatgagttaactccatgcagaaggcacccctggcagaggctagtatgggctaggctagtacttagtggacattaagttgtgcagatcttccctgagcatgtggctttgagtcttaagagagtgaggtcaacttcagcccctacctgctggtagacaggactcctaatgttaaccacaccttgatatggatgggctgcagctaagcttccagattgacgatccttgttttttgtagctgagaagggctgggaagggagaaggctgatagttctgtaacttactcttgtctgtctggcaaagtcttaactgttcttaaaaactgaatttggacttctgcttttgggaggattaagtagatatgcttttccctatttctcttactaagtccaattaaaagctcttggacattacatgtaaaataccagaagactgaaaagtagaaagaagaaggcagacaggctaggcacctcagaatctgagaatgatagggtggtgagttctctgggttttctttttgcctcatccaccccagtcttggagctgaaaaggttggtaatctggaaatgccaacaggcacagaaaaaaccccacaactccaacaaaaacctgctctctctagccaaaacaccagaacagaagtaacctaacaagacagaaaacttttaacaactgttctactgcagcaaaacaccacagaaaagaaccatggcccaaccccacccatgccaccaagggtcagctttggcctagccttcccttctggcaaggctgtgatgaggcaccccaatatccctgctggagtggtgtcagagaaggccgagtagtaatctgggcctttgatctctgttggctgataatgagtccactcacccctccctccacagtttcagtggagaccatatatggagtgcggacttacaccctcacctggcagcagcaaggtttttcttcctctctctgctggggtggtgtctgaagggttgagtggagagtcaggactttcaccattacccaggactaacaaggccacccctactgcagtttcagtggagaccatgtggagatccagtattcctactactactcagcaagcagtatcaagaagttccctacctttggtgtcaacagaagctgagtagaaacctgaacgtccatctacagctagcaataatgagaggtatgggatggagtgcccctccttttgcacctgctggagtggtatcagaaaaatcagttaaaacagaaggcttaaataagatccagaatttctgaaaataatttgaaaatgtctaggtttcaacaaaaaggcatgcatcataccaagaactaggaaggtctcaaacttagtggaaaaagatgatcaatagatgatgctaatactgagatgctggtattatctgacaaagatttaaagcagctatcagatccttcagtgaacagttatgaacattactggaacgaatgaaaaaacaaaaaggctcagcaaataaactgaaagtctcagtaaagaaatggaaggtgtaaagaaataaatagaaatttcagaactgaaaacacataaactaaaatacaaactcagtgaatgggctcaatagcataatagaggaaagaatcaaagacctataaaacacaacaacagaaattattcaatctggacaacacagaaaatgactgaaaaaagtgaacagagcgtcaaggacctgtgggactataacaaaatatccaacattcatatcactggagtcccagaatgagagaaaaaagacagataaaaaataatggttgaaatcattccaaatttggcaagaggcattagctacagactcaaaaaggtgagaaagcctcaaataggataaacccaaagaatcccacaccaagaagcatcataattaagtttctgaaaactaaaaaagtgaagacatcttgaaggcagtaaaaagaaaaacaacactttacctatggggagaaataatttgaatgacagcagatttcttatcagagaccgtggagtcaagaagtaagtggcacaatatttttcaagtgctgaaagaaaagaactgtcaacacagaatcctatacctaatgaagatatctttcaggaataaaggggaaatcaagacattctcagatgaagggaaaggaagataatttgtcataagtggcatagcctaaaagaaagaccagaggagtttctgtaaatagaaaggtgataaaagaaggaaacttggtgcatcagcaagaagaaaagaaaatgcaaaaataagcaacacatgggtagaaacaagagacttttcttgccttgagttttctaaattatatttgggaattgaaacacattttatgttttttatttattttattttaccttttttttgagatgaagtctcactccatcacccaggctgggagtgcagtgggacaatctcagctcactgcaaactctgcctcctgggttcaagtgattctcctgcctcagcctcccgagtagctgggattacaggcatgcaccaccatgcctggttaatttttgtatttttagtagagatgggggttttgctatgtttgccacgctgttcttgaactcctgaccttaagtcatccgcctgcctcagcctcccatagtgctgtgattactggtgtgagccaccatgcccagcctgaaacaaattttaaaaccctgtctgttgtggttctaaatgtatgaggaagaaatatttaagaccattataaatagggaaataaaagaatataaaaggaaatcaagtttctacacctcactcaaactggtaagatgatgacatcagtagacttataagttatgcatatgttatatttagaacaactattgaaattatacatggagacacactcaaaaataccataaacaaatcaaaatggagttataaaaagtgttcatatcgctcacagaaaggcagaaaagaaaaaacagaaatgaaaatcagagaaaacaaaaagcaaaatgtcagacaagccccagcatatcaacaattacaataaatataaatggccaaagtatgtttcattctgctgaagcaatggctagagttgccccaaaagtggtagcaaaggagtccccacaagggagtacccccaaagtatcccaagatggggccagttgggattccaaagaaagaagcattaaatgccagggtgatcagttcaaggcatttattaggggaacttacagagcactacagcatatcctcaggtggacagtgaaagaaaggtatgttatacctaggtatgcctatgccaagaggatcagggcatggagttcatatgaggatttaattaatttggctcaaggctgggaccaatttctttcagtgttttaggcaacaacctagatacctttattaatgcctgggaatgttcaaagccttggcttcggttcagccttgctgggaaaaacatgcaactggctgggtcacagagccaacaaggcactccctgtttttcactcagaatgcacaaaatggggggaatgggagaccctacaaagtacaacaatgaaaaggcagagattggaagaatggattaaaaacatgacccaactatatactatctaccagatgctcatttaaaatataacaatgtaggcaagttgaaagtaaaaggatacaaaaagatatattaataaaaagaaaataggagtggctatattaatattagataagacagacttcagaagaaagaaagataccagagactgagagggacattatataatgatgaaagtatcagtccactaacaacacatagcaaagggtagtgtcatgttgaagaaacgtgtctatgaaaatttaaagaacaacagcaaaaccatatctactaaagctaaacatattcctatcccatgagccagcaattccagtcttaggcacaagcctgagagaaatgtgtgtgtgtgtccactatgcaccaatggtaaagaagaacatgctcatgatagtattatttacaacagccccaaactggaaaaacaccccaaatatgtagcaacacagaatggacatatagattgtagtgtattcaacattgaaatactatacagcaaggaaaaagaatggcctcatatgacatgcaaccacatggatggctatcaaatgttatgttgaatgaaaaaggccgggcaccaaagaatacatatatactgtatgattgcatttatatgaagttcaaaagcaagaaaggaaaattaatctatggtatagaagtccagttagtgattccctctgattgtaaaggggcacaggaacccttctggggtaatgtattatatattaatctcagtggtggatatgtaggtatatacataggtcaaaataaattcactctttttttttttttttgagatagagtctcgctctgttgcccaggctagagtgtagtggtgtgatctcggttcactgcaatgtccacttcccaggttcaagtgattctcatgcctcagtctcctgagtagctaggaccacaagcatgcaccaccatactcggctaatttttgtacttttagtggagacggggtttcaccatgttgcccaggctgctcttgaactcctgacctcaagtgatccacctgccttggcctcccaaagtgctgggattataggtgtgtgacactgtgcccaaccaaaattcaccaactcttcagatttgtgtcttttatatatatattaaaaatgtaaaaagttacaatacaagccagattctggtcaagtaatattaattatttactttatgccagacactgagctgcagacttgcagtacacatgacactgggcacctgcctcagtttctcttctgcattatgatttctttctgaatctgggtgtctctctagtcattgactgggcttctgctccattcttggtcagcagttcatggatatcctgtttttttttttttttttttcccatgaatattgcttctgtttgaggtcttcccattccagccccagaactgggtccttagcccaatcactacagcttgaacagaccacctgggacattcagccttttgtggagggcccccagctcagcttgctgctcccaccatctctgctttccctcatttttgcctctaggattctcccagtctagtacctgcacacacatttgctggatggatgtccctctagatgatgataaacacctctttatggcactttgcagagctgctctctcagcgatgggcatcagcatgagtatagctgaaagctgagactacttctcttatgtcccctctcacttctcctctaatgagcctccctaattttaaaggtgctatttcctgggtggttaaaggaagatgagagttttattaaggaaaatgcccaagtatcatcgttgctagggaatccacctgggagtctttgctgcaaatgtgcctgtttgtcatttcatgccttacttggggcactgactttgctgccaggaataccaaatctgtttttcctaagccaccactgggacagatagctgggaagatgaccccactaatagcccattagtatacaaattcaaaaatgattcagcagttcagggataagagctccatgtgggtgcaaacacatcctcaggcttggctggggcacaagattgcagccttggtcttcagcaggcaaggccaggtgctttgctcctgaaacaaatggatcaatgtgctggttattgctaacaaagtactagttgggcccatttgtgggttaaaacagccatctctagactggtgggcccaggatccttgttcttaattgatttctcttgcttttcttgtggaaatgaagtaagaagttgcttattaaccaatttactttgaccattttccattccttaaccaacctgcaataattcgtagcatttctggaacaaaagcagcagagggctcctcctgagttaatattggtgaattacgtgtccaagatagaatggtttttggttgtgcaggttaagaagtaagccttacatgctgcagggtgttggctataagtaactgctccttttatggaagtcaaagaatgcctatctcctggcagtaatctgttccctgttgccaaggtaccagggcactgggtataacttcaggagatctgggttctggtctcagctgtagcattttctgccttataaccttggacaagtcatagaaagaaatgttctagagttgaaagagctcatctatggctcaacccctctgtatcaactttgcttacccatgctgtctttgcttagatgtttccaagactcactactgagaagcctacttcaatagacaaattctgaatatgaaacataaaatggagtttgttcattcttttattaattggatgttggctgtacttgtaaccacatctccaggttcactgaccttggagcccatggatattcacatcttatccattgcatgaaggcggtctctgtggaatctttctagaaacttgtaagacgggacttgtccacaaattagacttgctcagtgtggctatcagggttggccaatctggagctttgtatctgcattggagtgggcaacgcaggccttctgccttctgcttccacatcacggccttgaagtgctgggttgtgtgcaggaatgaatgaccctcttcccgttttgtgctgcacttttttgtttgtgtcttgaagatgcaccttctgtgcccagatgttcatcacatcttcaatgaaggcatctcttttatcttccaaccttgatttttctttcctcaggggctctggcctgtatccagtctacctttgcccatttcttccctctcccccagtgaaagaaaatgtctcccttcagccaaaacaatagccaccgtgcaagaggcttgggcaagttgtcttagagaggagggaatactgtctaagctctgctcccgagaagccactgactgtcagctctggcttggtggactggacactgtagtagtgagtagagtgcccagaacagtacttagtataataggcccttggtaagtgacagccaatatggcagcctcattcccatctcccaggcctggtgtaagataatgtagatcctgacgtatggacaggatcaaaggcaggaggtgtcctgagaacatgaagtgggcccaggattggagcagcctggaagaggggaagactcactctgggaagctccagcttgccttgttcccagcagaagcagcaggtggagcaatcggcaaagatcattccctttctccctgtgcacatcttccctctagaaaccactgcaattattattattattattattttttgagttgaagtctcactctgttgcccaggctggagtgcagtggtgcgatctcagctcactgcaacctccgcctcctgggttcaagtgattctcctgcctcagcctcctgagtagctgggattacaggtgcccacgaccatgcctggctaatttttgtatttttaatagagatgaggtttcaccatgttggtcaggctggtcttgaattcctgacttcgtgatctacctgccttggcctcccaaagtgatgggattacaggtgtgagccaccgcggccagccgaaaccactgcaattcttgaatctgagtccagcgggaatgatgctcaagattgggccactatcatccagagactggcctcatggaagatgtgacactggaaagagctatgagtatgggtgagccattctggggcttgttgaactccaggtgaggaggtgaggaaccaggatgatggcctcacatcctgctctactctatctcactccattctgggctgatactcccagaagctctggcaatagggtctggtgctaggttggaaggctatgtggctttctcaggggggccagagagagaatctaaagttgagacaggatgcaaagcctagagctgggagatggggtgcagattattgaaccaggagcaggttgaactgtggcatgcatggtagttgagggtaagctgttgaggaccaggacagcgaaggggcaagattgtgttggaagcttctttgtgcattctgtgggcaggagtctgggtcagcctgaatggttattggagtcatgtagggatgggcgctttcatctgattatcctacaatcagatggatttgattctgcatgtttccaaagacctgctggatacccccacatgcacatcccatagccaattccattttatgtcttgatggtatatattctgccctttctcacattttctgtcctgggaacggcactaccatttaccgaattgcccaaggcagaaacttttcccttccttaccatttataatgtcttctggtctgtttttcttcctaaatatccttggagactatctcctgtcctccctactcattgcctttatgtcagtcagttctagtgttttctccctggggcacaacatccacggctcccgagatccttctgcttctgcccagcaaatccaccttccatggggtcccatttctatatcccaaccttaggcatgccacttccttacctagaatgaatccttgatgtcttcagggtaatgttcagaccttgcaggacccacaaaatcctccacatgagttgctgaagtatctggtactttctccctccactttcccccatggcttcctcttccaccttctcatcatagtggataaaatttattgagcatttattgtgtattgggtcctgtgcttggagctttacaaatatcttgctgattcaaagaacaaccccatctgtaggtcttgtgctttgaccaccacgtggaacccctccctgctctccagctctgcaatgccccaaagctccatgtcttttggaaggtatacagactttgtatcagatttactttacttaaatcctcactcagaagctgtgttaccttgtgcatgctatttagcttttcaatgcctcagtttcctcatctgtaaaatgggagtaatgatggtacctaccttgtaagagagcccactgcagggggttgttgtgagacatgtaggagaaaatacctgtaaagggctcagcctggtacctggtgtgcctgtagtacttaacaaatgccgagcgtgacaccgcgtgctttggataccctgtcttccttctggaagagtcctacaccaaccagacagtcaagtcactgccattcttcaaggtcattctttcttcccaagatcttgtacaacttccgcaggctggaagaggcaccctccccagtgatcttggagggtctgtgttacctctaacatagcacttacctccctgggagcagttggggttttcttgtctcttgagggcaggatctgtccttggccatctgtgtgcttaagggccaagaacagcatttgacacagagctgggctcagtgagtgcttgccagtgggcaggagctagcaagtgttcgtgagatcctggatggtggaggagtgccttccacgtcagctgtttcacggtgtgccctgtgctacaacctgacgtgtgacaggagaacttaggaggcctgtcacacctctgacctcctgacagatttagtgtaggttggggctgtctgtatctcggatctccccccatcctaccccagcagtagagtcacatttgcatactgcagccatgatcaagttaaaagaatagttgagatgaaaggagccaaaagccaggtctcttgggcaatttctctggtaatgcaggaacagaattatccaaggagtgattgacaaattagaagcactttgcacctaattttaatgcatttggctccttgagaggaggaatatgttaacttaaaattattcaccttgcagtagcttctgtctttcaaatcaaaatcaatcttcatgtggggtactaaatcttaaggaaacaaattgctttctatggtacattgctttctttaaatggctttatttggagggccagctgagcaagttaatttcagtggcacagctggctggcgattgtggagtaggcattctcccatgtagttggagggagcttggtctggtgctcattaaccacccttggattaaagaaacagtgagtaattggcacatacataggaccatggggtggaaattaaaacagtttcgagacccaagttgttgtgttgatgtacaagagtttgaacttggtcctgggaatatcctttttttctctctctcagtggctcccaaatagctgcttctgtaccttagggccacgttatctctctcatcaaccattatggaaacctattcctggaaaaggaccacatagactcattcacatgaaggtgatcataactgatggcagcttgaattgtggtataatctttaattttttttttttaatttcaaaagaagatgaagccaaagcagttaatctcgaattagaaattttttggcaagaactggtgagtggagacctgctgccatccccaagggagctgcctcccctagaatcataacattctttagcaagaaggaaatagaggtttttctagttaaatttcttacagaatgcagaaatttcattacagaatactttaatagttgttcattctttgcttgaatgccttttgagatggggcactcatggcacgaaaaagcagcccattttattgttgggtacttctgatttttaaaaagttacaccttattttcaactaaaattgggctccctgaagctgccaccatagttccgcactctagattccagatgtcttctaaatgacagctcttgccgggtacagtggctcacacttgtaatcccagcactttgggaggctgaggtgggtggatcacctgaggtcaggagttcaagaccagcctggccaacataatgataccccgcctctactaaaaatacaaaaattagctgggcgtggtggcgggtgcctgtatcccagctacttgggaggctgaggcaggagaatcacttgaaccagggaggcggaggttgcagtgacccgagattgcaccactgcactccagcctgggtgacagagcgagactctgtctcaaaaataaatgaatgacagttcttcacatgtttgaggataactccctagtctcatacttcataacatgttatctcttcttagggttaaacattccttattctttgaactgtcctctcactacataactttcagatttgggttctggctattttccttgggacatattccagtttgttcccattcttcttaatatgcggttaatgcagtttctcttaatgcagcctggcttttagggaggagattatctctcatccacaaagctttgaagctgagtctgcccattctgtggctgtgcagacgctttcatggtctcccaggcaggactttgtccttagccctgttaaatttgatttggcctattctggttatcactccctccatcctatgtgtcttctatccctctcagcaacttgccattttcacatttgatgagctttcttcctgacagtctctctgatgagatgtgaaaggctattaaggataatttacttagaagtaagaggcgacagtggtggcagcagttttttaaaaaacaactcattttataagtcatgtatttaaaatagaaacacaaggaaaataacaattacctataaaaagctattttttgcatatgtccttccctatacacatttatccaaggattcatattgtatattttgttttttcacttaggaatattttccaatgttactaagcagtcttctataagtccatttttaatgcctcccttatacaggaaaaatgataattaatcacctattgttggggatttaggttgttttccaatttttccatcttgtgaaacatgctgctaggtttttgcactcatctgtgataagtttctagagatggaattgccgagggcaacaggtgggtacagtttttgatatttgttgtcgaattgcacttcagaaagatcatgccatatgaaacatactattttatatttctaaaagcagcatgttgaagattttgcttctgcagttgtttcaagcagagttcttggcaatgtggacagtgcttggtagtaacacattcaaagagaaaaggtaccccgcttttaggaaccccaaattagagcaatactgatggaaagaacaatagaagggacccaggaacagaacaaaatgcctaacttaaaattctgttttaaacatttatttctgttttctactttgttatggaatatgctttttattttaggctgccattttaataacgtttacttctttaaagtaaagaccaatatggtgaaactccgtctctactaaaaatacaaaaaatagctgggtgtgatggtgtgcacctgtagtcccagctacttgggaggctgagacaggagaattgcttgaacctgggaggtggaggttgcagtgagccgagatcacaccactctactccagcctgggtgacagagcaagactctgtctcaaaaaaaagaaaaggtcaggtaccttcagaaactgatacctgaaggtatcttttctcattcaagccacatgataggatttgccaggatgtgacaaatatttcaaaattcacaccccagatcctgggatctttgacacagtaacctgaagattccttgtgtaaaatgtaccaaaatacctgatcaattttactcaaaacaagtactaatttctggttgtatttgtagtagaatcagcttgaatagtttttagattcttgacatataacatagttaagtggatcctccaaactgatatctgattttttaaacagttttgcaaaagatgtggaatacactgattccaactaaatatagcaggtccaatctctcaaagattgcatataaggcaatcagacagctgctgtcaaaggaactgatgcttctaaagttccaaagtacgtcactaaaatctaaatcacttcctcacacatatacaaaactttagaattccatagggaaacagatatttattttagccataaaactctaaagatgttctaatttgttgtccatctgaccacaaaggcgttgtatagcagctggttttgcagttggttgcatgtgacagaaacctgactacagtgttttaaccaagctggagttcatttcttttacataacaagaagtccagggctggtgcagctgcttgaagaagtttccaggaatccaagtgccatctaattgcctggtccatcatctgtgtaatgagattttttttatcctcctgtttgcaagatgtcaagtagataggggaaaagctaaagctgtgtgcaagctaattctgttcctttttatttaaaaaaatctgttttcatcttactgcctcaaacaaggtccacaggctacctcctagctgcaaaggagtctggaaatatgaaatgtgagtatttttaaattgaggttattaataaggttgaatggggagaatgtgttggaaaagtattagtctcgggacttgaagtcatttgtcttaatttcagctctctcacttgcagggtctgcaaacatgaacaagtcacccttttatctttggcttcagtgtatcatctgtgaaatgatgaggttggagaaaatgatcttgagagccatagggtacaggagctggttcatatcaacttatgggagctgactgtgtacttctcatcccaactctgagttcagcagtgtcatgttggtggcctgaaattggcattagtgagagtattttacaccatggaaattagcaaatgctgcaaatcagggtattcccatccactccctccctaagaagtttgttaaacatttaccactgtctgagaggccttccagtattaacagcctctggatatatcatttcaattttataaatcagagtttcaaagggcaatgagaccttactccagagacttctaagcctcacccattcatttttctgttttatgtctctaggtttctcatatcgtccccttctccatttccttcaatccttgctttctgcttttttaccttctcctcactctgtctcagagaccatgtcatgaaatttagaaacaagtttatttgttatgactatacaccaggcttttgtgtttctgattgtcaaatgagaatctgtcaaatgtctaatgtgatatgcatttaatctaaatatttaaaaaacaaacaccacttctttctttccaccattacacctgaagttgatttttacttaagtacaaccctgaattacttttcttcctagtgtatttttttaatgatcaaggattacttttaatcatctgctaatcaacaatatgattaagtattttttcaattttgtcgacagcacagaattggaaattgacttaccaaaggcttggttgccatctcatcagaatcattaacaatttttattgtggagtttttaattaaactttttattctgagataattgtagattcacattcagtcgtaagaaatcataccaagagatacagagttgtgagaataatacaaagtttacattctgccaaactgtggtacaatatcataacaaagatactgacactgatatatcctagtgcatctaaaattttcaatcaaatatttaaggttctgtaacatggttttggatatgaaagggagtgtacctcccacaaaggaaacaattattattattcttttatcttttaaaaaatgttattttaatttttgtggctatatagtaggtatatatatttatggggtacatgagatattttgatataaacatccaatgtgtaatagtcacatcagagcaaatggggtatccatcaactcaatcatttattctttctttgttccagaaacaatccaattatattcttttagttattttaaaatgtacaataaattattgactgtagtcaccctattctatcaaatgctagatcttattcattctatctaactatatttttgtttttgtcaaccttccccacttccccttcaccctctaaccctctactacccttcctatcctctggtaatcatattctactgtctccatgagttcaattgttttagtttttagcttgcacaagtaagagagaacatgcgaagtttgtctttctgtgcctggcttattttacttaacataatgatctccagttccatccatgttgttgcaaatggtaggatctcattctttttatggctgaatagtacttcattgtatatatgtaccacattgtctttatccatttgtctgttgatggacacttcggttgattccaaatcttggctattatgtgtagcactgcagtaaacatgggagtgcagaaaactcttcaatatactgatttcctttcttttgggtatatacttaacagtaggattggtggatcatatagtagttatatttttagttttttgaggaacctccaaactgttctccatagcagttgtactaatttacatttctagcaacagtgtacaagggttaccatttctccacatcctggccagcatttgttattgcctgtcttttggataaaagccattttaactggtcattgtagttttgatttgcatttctctgatgatcagtgatgttgagcaccttttcacatacctgtttgccatttgtatgtcttcttttgagaaatgtctattcagattttttgccttttttttttttttttttttgagacagagtttcgctcttgttgtccaggccggagtgcaatgatgtgatctcggctcaccacaatctccgcctcctgggttcaagcgattctcctgcctcagcctgccaagtagctgggattacaggcatgtgccaccacgcccggctaattttgtatttttagtagaggtggggtttctccatattggtcaggctggtcttgaactcctgacctcaggtgatcctcctatctcggcctcccaatacaggtgtgagctaccgtgtgtggcctttttgcccatttttaaattggatgattagatttttttcctgtagagttatatgagctccttatatattccagttataaatcccttgtcaggtggatagttagcaaatactttctcctactcggtgggttgtctctttgttgattgtttcctttgctttttaacttgatccagtcccatttgtccatttgcgctttggttgctatgcttgtgggaaattactcaagaaacctttgcccagtccagtgtcctggagagtttccccagtgttttcttttaatagtttcatagtttgagctcttagatttaagtgtttaatccatcttgatttgatttttctatatggcaagaaattgtctagttttattcttctgcacatgaaaatacagttttcccacaccaaggaaacaattgttaggcccacagcaggtgccaaggggtccagccaacttccttcttctgtttaaatctgtccccatcttttctcttcccagcattccacagctgggtcttttcttgctcaagttggatgaaaaacaaagtctaatatcttattcctcaaagacatggttttgagaactagcagcatgggtaccaccagggagcttgttaaaaaagcagagtcttgagtgccaccccagccctactggatcagaattcgcattgtaacaagctcccaggtgattctcaagcacattaaagtttgagaagttctgattgcatgttctcagtcatatgtgaaagctgaaaaaagatgatatcatagaaataaaaagttagaacagaggatactagtagctgtgaaaggtaggggaaggagagatagggagagatttgttaaaggatacaaaattacagctagataggagggtaagttctagggctctatatcgctatagggtgactataattaatattatatagtttaaaatagctagaaagacattgaacaaccccaacagaaaaaaaaggtgaatatttgagatgatggatatgcaaattaccctgatctgatcactacacattatttgtatggaaacatcactgtgcaccccatgaatatgtgtaattattatttgtcaatttaaaaaatgaaagaaaagaaagcaaagataatacagcctttaaaaagagaagttttggtgtaatagattactgggctatcttctaagtcagacgcatctttctcttggggttctctaaagaggtccacctccaattctaaacacctcctcatcacgagaatctatcaccagttctacggagagaaccacagagtcagtagacctaggttaccaccgtcttctatcaagtctctctccctcattgagcccagggaatgtaaggatgagagatttccctccttaggactgatccatattccagtaagcccagggttccgtctctgaaggggtgattaagggaggaaatctggcagcctgtgagagtactccttcatagctaccttgaaggtgggagacattgtctccattcttgctttgtcattcataaattgatcaagctctcctagtcgcatgaagccgtttcttcttctggccttccgttttttaactcttctgcaaagagagtgaatgagaataaatgtttgatggctacctgctttgtgtcaagtgtcaagggctttacttaagtgatctcatttaaatcttgtctcccactgtgtaaggtaaaccctatcacatcccttttgcagtcttgaataaaaaagagacttaaaaaaaaatactttgccaaacatcatacctaagtgaaaagatgtgattttcctctgatttgattttgaggtttctctctgaagaatggctataaattctagtcctgtcctgctggggctccaggggaggtatttgtggatgtttacagaatgcctttcatgggatgcttcttcccagtagacagcctaatgcctaagcgtccaacctgtgaccaggtgttcctctcacaggaaacttgttttgtacttgcagacacccttgtacctcttgtctgacgtgttcattttattcctaccatgatagccactctctaggagagccctgacatggaaagaacttaggttcagattgtgggtcaggtgagacatagaggagacagcacaaccaaacaaatgtaataacacaaacagttttattactcgcagctcccagagagaagagagcagcacactttgcagggccagtgggaagacgtgagctatccagagcgtgcatgctgagccagcaggtggagagaaggagggagggggaggacttgtttataggaccctgggattgaccattagggtatttttgtggtcagccactgtgggatgtgttgtgttctgaatcagtgaaatgaggaacaatagagtatatcacaaaccacatagggaggggaagttttaggtaaggcaaagggaattgggtccaactgtgtttcaagtaacttatgtcgagcctgaaaatagatgccaaggcagcaactacattaaacaaatttatgacagaagataattattctgggtgggtagaccctgaaaaaattatccttccttggataaaatcaaagagcacttcctctgaccttggtctttttaacttctcacctgattacagctactgggctttcgttagcaatcttgtccatgcccacagcatttgaggttaaactaagtactttctgcgttctgtttcatttagtcttcataagatccctgtaatattgcttttatcccatttgtcagatgaggaaaatggaaaatgagacctgccagaggagcgaaagaagttgttgaaaatctcgcagaaactatgtaggcaatacccactaggatgactataataacaaaagacagatagtaagaagttggagaagatgtggagaaattagaaccctcatacacaggtggcatgaatgtaaaatggtacagccacttgagagaagtctgacagttcttcaaatagtgaaacatagagttaccatatgacctaacaattccagtcctagatacatacccccaaatgaaagaatactgccacaaaaacttgtatacaaatgtttatagtttatagaagtattcatgatggtgatcacagcaggagacagacaaattcctaggcagacagagatgggtcctggtgaaacccaaccctcaagccaaagacagcctgaagcctgaaaactaagccatttgccaagctgtgggtggcgggaacaagcgagagctgcgacatttcttgggggcttggaccttgggactccccacgtgagagctgtaacaccccttggggctccacaattgctggcatctccaagttttcgggcaccactgtgttcccctcatctagacggcagagtccaatccagagatcgcttgcggtacacccagtccaggcgctggctgagcgtggatcctgcagcaagtgtgggatctgggccaggatgcaagcggagtgcagcctgccaggcccagtgggcagagtgagcccagcaggcccaagcaaggccctaggcagtggtcatggcggccacagagattttcagctggggaaggggcactcaaggaattctgtaacactgtaaccctcccttccactcgctgagcgatgggtgagaaaaagctgctgggtgccatttcctctcgctcactaaaccacaaaagctgtaataatagccccagatggaaacaacccaaatatccatcaactgatgaatagctgaacaaactggcatatccatacaatagaatattattcagccatcaaaaggaataaaatattgatagatgccacaacatggaagaaccctgaaaggattatgctaagtgaaagaggccagtcacaaaggatcacatattgtacaattcaatttataggaaatgtccacaataggcaaatctatagagatagaaaatggattagtgattgcctagggtttgtggggtgacggggagattggaggacagtgaaagcaagggatttctttgtggggtaaggaagtattctaaaattctggtgatggtttcacaacttgaatatattgatagccattgaattatataatttaaatgggtgaattgtatggtgtgcaaatatctcaataatgctctgaaagcaaacaacaacaacaaaatgaaaataaaaaacaaacgtgagagtcagtgatccatccaaggaattccctaaatgttctgcatttcttctatcaaactccaccaagctgttaaatcagtggttcccagcccaggatgtgcactgataccctgatgcctagagcccctgatgaatgacagcagaagcttggggcggacctggacatcaatatatattatagctcccaggtaataccccatgtgcagccatgttttttatggagaagcttttctaccacaagtctctgttcagaggctgtgatctacatggaatctaaaagatttggcatgaaattttgatcaaagcaattacctatatgctttttcagtggaggttgtctgaggtgtagcagtcagagaaattgaactgtcaaaaacgaatataagaataataagagaatatttcttcttcattggacacccaagatgaatagcaggtaaaataaaattttaaattaaattgaatatgtatacgactttacttttttgttaaaggactataacatgaataatgaacatattaaaaagagaagaccagaccctcaatttctttcaataatgttagtgttgtatatcctagcttgaataaaacacatttcattaaaacacccacacggttctgcaatgcattatggatggcctctctggagaaatcttacatgcctttcaatttcgacatagtgatatggtaataataaaagtctttggcatataattctgcaggtatttttacaattctgagttttgctgatcaaaagccagggtttacctcacctgggttctgacctgcagtagattgggagaagtgaatggggcagaaaggatcatttttgttccccatatttgtggggttgttgtatcaaaaatctaaatataaatgtatttgaaattgtattagttgagatagagtttcagctgctctatcaaacactcaaaatgatagtggcttaataagtaagaagatggtttctctctcccataaaagtccaggtgagtgtggctgctctgttctttgctagggctcagcaacccaggctgtgtctgtgtttgcttctcctttcattcctaacatactgtctctctccatatggtccaatatgacccatcactcccaccaccatgtttgctgtgggaagagagaaaggaaagagcagagccggcctcttctgtctaaaaacaggaactggaagtggcacatgccacttctgctcacatcctgttggccagaacttaaccgtcttaatcatatgacctcatctagctacaagggaggctaggaactgcaatattgattttagatggccaagtgtccaactaagagtcaagagtttctattactatagaaaaaggagaacatgggtattggggaataataagcagtttctactgaaggaagatgcaagggcctataatatcatggatattataaaggtaaaatgaatttcttccttgcagtcatctagtaccatctctccatcatctaatgaggaaataggtctattttagtgcctttgcctcctccaatcctcattatcacagggtcctactgacacgtaggttcaacataaatttattaaaggcccactctgagttgagtgtatagtggacctttaggtgctcatgacaatcccataagatagctattatatctatttgccaatgaagggaagatgactcacagaggttaagctactctcccaaagccacacagctgactgaggttctagtatctgctgggtctatactgggggacttcctatattagggacttcctagttttcttcctgcctcacaatggggcagggagaagactaggaagtgctccccagaagatagtgagttaggtctttaaggagaccacaccagggagatgggggaggagtggggtttaggaggagggagcagcaggtatgcagggcatagcaaggcacttctgtagggctacaagcacttccacaggtggaaaagtaggatgtataggggagtaatggggatgaagtagaagaaacaggcagaagccaattgagaaggacacctaaatggccttttgtagccaaaggagagtcctgaggggttttaagcaggagagtgatgtggtcagatttgccttctataaatctgcctagaagtgaggagatcagctgggacttgacaagatttgagcaaggaatgaacacctcaatggtgcaaattgcgtcttagggaaagagtcaatagatacgaagagttaaaattatagttctgatcttatgtgagggtgagggagagacacaattacaggacaactcctaggatgacccagggtttatggtatggatgactgagttgatgttttcacttatgaagaaagatttaactagtttctctccaactgcaaaaataatagttctaaacatcttcatggcagaagactgtacaattaagaaatttatgggaaaaatagaatggggggaccagggtagttaaaaacgtatgaatgttcttataggtacattttacacttgcaatattaaggtgataatatcctgaataaagataatgtcagtgacagtttttgtatcttaaattggcaaaatagcattaatagttactgtatcattaacttccacctactatggctctctggaaaattttggtatcatccttctgtatagttttaatggaatatggatttgttttgctctgttgaagataataagcataccaagagacattttcttttagtgcttgaacctccatccaaatgcttaatgcctttctgattttaagatttggactgcctaagtcaccctatctaagtcatgactcaaaagtaattaccaagtcacatataaacatgatcgaaaattcacacagctgcaggagagaaacagagaaagaagtccatccatgcacaccagaattttgagtaagtggagattgctccaggggagggactgctgctggtcaggaggaacctggactgtaaaggtagaagtcactcttgtttctttctggttgattgtgcttcatgccacagcacctgttcatgtgacttcagttgtgtgctcagtccttcatccaggtaggtcccactgaagtggacagaatgggagaggggcagcttgagctgcattctcagggtcttgcctccaaagcctatcctggctgagctggcctgacctgatgtttgagccctgatcatggctcacctgccttgtttctcataagtggaacttcatcataaaggaaggggaacagcttgggctctgccatttgctgactgcgtgaccctgggtggatggttcagttgcacaggctgttctctggggtatttcaggaaagccatagctgtagactttttatgtaaaagcagttcagggctgaagtacagtgggacttgaggcaaaagtggctagtggacctgtcctggacctgtattaacatggcagactctccatctctccatttttagtttccttatatgtgcaactccaatgaaaaacacaagcattttctaaagatgcatttattcacagttcatatgagattaaggaaagttcacgtgtccataccaaagaaagaaaaataaccatatgaagttatatcagtagataacacaagaaaatattgatgttcaccctggttttataatgcatatattatggccaaaaaaatacaatacattcatcctaccttcaaaaggcttagtgaggctaaggagttacagcattgtgattctttggttattgtcagaaacaaatgcttctgtgactccagtgtaagctcttatctcttgttgaatttataactaattcagtttgttttgacaccactactggtattcttcaagaaagtttttgttagtagcagggaggaaaaatatgtcacataccatagaaatcattggcaaagccatgccgatgcagcatagcagatgggaggcaaggattgggtgggtgggagagtgagtgctcccgaacccgagggggttattggaaggattaaatgaggtgatgtctgtaagatgtctatcttggcgactagtatataacagtggctcagtaaatggtgtctatgattagaattattttttcaagatccattccttacttcaatcaccagtttgatacttagtctcaacccttaatgatacaaatagacatagccagcattcccaatcccaaattctttgccagtttcttaagaaagcatactgtagctccacttttgaagatttgcaatgcatatttgaataataaaggctctgagaagtcctgcatgaaagaaacttgttgacttttgtgttgccttgtattttccaaccttttcagacccattttttttcatggactgcctattggcagtttttggcacaagaattctatggaacaccctatggcaaaatgatagtctcacacctagcatttcttcgaggtaaagaattctagacagtgagtcactgaaaactttttaggagaaaaattaagttttcttttcctcatcaatcaaattaaagtcacttgattttgtgaacagtgttttgtgacagatgaagctatatattcagacttgactgatgttactgatttctagccctggaggtcaagggagaggcaagctggggtaagacaacaagctacagattggtctgggcattgcttggcaattatccttaaattattcttcacaccaaagttcacactcgcgtttactcaaactcatcttctttgactcaaaaacagccataggaagtaggcaggataggaaatgaccgattccatcttatatccaatgaaactgagatgagcagaggtgaagcaatttaaggcgaaagagctagaagtagaacttaagtctcctgactcaatttaattctacaagcatttatttagcacctactatgtgccaggtacagtgcttagattttgggagtacagggtgacaaaatcaaatattctgcagaatttagaagagacatgtaaaataagagttacaacataatgtgaaaagtgcaatagtagacacagggaggatcagaatggtgagggaagaacaaaagaaaaggtggtttatgaactgggttttgaaggataaataagaccttttccccaggaaaacaagcagggaaagacagaggatatcgctataaaattgttaatgtccctctccccgataacccccatagcaggtgatggaccttagaggatattagttgtgtgtgtgttgtgtgtctaggctctgagatagtaaaatcctgaggatttccccttcattcctttctacttatttttgaacaaagttggaggcataaatgttttgcaaggaccgcgtcgcattacagcatgacgatggatgggagaaattcatctatgaggttaaagtttacaactttaataaatcaaatctcttaaacttgcgattgaaaaactagcaaaagggacaagattctggcttctggctgcccacagttctatttcatttgctggctggggaaggccttttccctggggcctgattggcagtgactcctgcagtgtttcagcccaaagttcccttttcttgattaatgtgattttctatgttttcctggtagctcagaaccaatgaagagcagtgatctgggaaaccacctcctgtgattccctttgacagggttctcagtggaacagaacaagtaattttggttggcatcccggaaggttgcctttaagcagcagcagtggcagcagccaaaggagcccgataccacctcacctggaccttcctgcagtgcaggaggctgggtggtgtcaggatcactgagccagatacaactaggttgtctttggctaaactggtgtgcttttgcaagcatgtgtagatagattcctatttaaaagacatctcaccatgagaaaaaagtcagaaggccagggcagtgggaaaatgatcagtgcatctgaggattatgaaggggtgatgggtacaacctacagttgctcatggatatttcttttcctccccacagagggacaagaggataggtaacaagaggcctccaggtgccaggcagcagtggctgtactttgtttctctgtggatggaaaatattctgcaactcagggaggtggccagagaccaaaggactgcctgaagctgggcagcaacacaggaagggttgcttttaattaaagttctctttgttttgttgcagcgcctaagaggttggcgtctgagaattttgtcctttaccttcttagaaaggactctcagtcttggccaggtttgtgaaatgttttcttgtaagcacatcttcctacctaaactttgaaagggaggatttattcagcttttgaaggaaactggctaaaatttggtcagatgacatcagccctgccagccagcctgggtatgcaggtcgttccccattggactctctcacgccttcagatgcattttgtacatgccttcatctttctctgtgtcctgcgaggctgacatctatagattgtttaacctgcgctcccttatcttctggcttctgcttgggtttggcctataagtaaaggagagagggtaggaacagagagattcgggcacagattccggattccctctctgcctgcactggtgcgtgcctctggctgtggttacactcttccatgtctactccttggttgttcccaccacactgggcttcacgattgctatggttatatcctcctcttgcttcttcaagccaaggacagcaagactctagctcttgctaattttggggtgtttttttcatccttttctccccacttaaatcttttcttaaaaagtgaggtgaaatccacatgacatgcaattaaacattttaaggagtacagttcagtggcacttagcacatacacaatgttgcatgaaaaccttctctctccagtgttaaaactttttttttttaatcaacccagaaggacatccattaagtaatcactttccatttctctcttctctccatcgcctggcaaccactaatctgctttctctctctctgggtttgtctattctggatatttcatataaaagaagtctacagtatgagaccttttgtgtctggcttctttcacttagtataatgtttttggggttcattcaagttgtagcattgttaatacttcattttttttttttttagatgaaatttcactttgtcacccaggctggagtgcagtggtgagatcttggctcaccgcaacctcccaagtagctgggattacaggcgcccactaccatgcccagttaatttttgtatttttagtagagatggggtttcaccatcttggccagactggtctcgaactcatgacctcaagtaatcatcccacctcagcctcccaaagtgctgggattacaggcgtgagccactgtgcccgggctccatttgtttttatggctgaataatattccattgtatgggtagaccacagttgcctttattcttaactctgtaagctggtggttctcaaaatgtggtccttagaccagcagcatcagcatactctgggtacttgtgggaaatgcaaattctcaagaccatccactccacgaaactctgcgaggcagggcccagacatctgttttataacaagctctccaggtgattctgatgcctgctcaactgtgaggcccacttccataagtagcctcttgattaaggtctcctcatttaaagcatttggggtgaattcatttcctgctgggaccctgatgaataacacctccagctggggtaactgacatctgtttcttgtgtgtttagtgctgggcacactagagcagggcagggggtagttttaacaaccttagttctagaagtagatataaagcacatgttctaaactggctcccagagttccccagtgggcttatgttctggttgtctggagtggaaacttgctttataagacaccatttttttggccgccttccccttcctgtttgatttcaccattctcctactggtgccagttcttcctgtagttactctccatcccccatgcccctaccctcacaaagaaactacttgtgcttgaatctttatctcagggtcagcttccaggggaccccaaccaagataccacataattgaccatcctgaaaaaatggccagtgtgaatacgggtaggagattttttgattcagataacacttgtgctgttacagccctgaactgatcgaggaagattatctttggagtaatgtgggctaactgtgacatttatttctgttaaatcactgtctgctcccagctacttggtgaaggaaagcacatggccctgtttgggattcaccttgaatgtgtgtctaactttgcttgttctgggttgctaccatagtaacaggagtaattaacctgaatttcactctcttgctctctctacaccacctcccctctcccctactccagttcattctggatttgctttgaaacattttagtgaagcagttagaatgccttcatctaccttcatctgcacatcgatgatacccttttcctggttttatcaggctgcttgtttttgttgtctgtacatccatttctttggggatgaagcacatgcatggtatagctcaggcatttaaacagggttcagcaattataaaacacagaagtgacatcaactgggggcagtgtttgggcttcctttgtcaactcagaacatctgtttggctcatgggggcaccttagtttattgctgtcattaagagctgtcagtcagaggaactgagacctgcacttcccgctgaggtgttgaatattaaaaacttacatttcctaccaagggctcagtcctatttcactcttttttttttttttttaaagtaagttcttaatttttgttcataagtgtatactgtgttctaggagacattcaagaagtaaatgactggtcctttttggtggacacttttcacccaaaagaaaaaagaatgataaatttaacaggttcctgtgataatctatgctgcatccctttagcctacctgattttagaagtgccatggtagacagttgcctgtaatttagttgtcccacatcaaagttgtgctgtgatatctctttactgtttcttcaaaacttcaaaagcctgcttagccttgttcagggacaactcagatgtgtatgggatgttagcatcccagatacaacccctgagcaataggttatcagagttggtggacaaatgttctgcctccttgtgctctgatgggacaattctgaggcacattctaatagctcttcggaggatatcagaaggagttgagcaccagttgcccaatgaggctgtcagcctgtcctcttttattcatttatttttctgtggctgacactattgattgcagttcaggtttcatggaaagcagcttccaagatggggatagcacgctggaaatttactgaagaatgcctttgggatcaaccactgtagaagggaagggaaggaagcaggatcagacagcagtagaagttgggctggaatgcagcaaggtgcctctgaaggtgagtctggcaccctttctattctcaccctggatgagctcctcaactctcatattcaacaattgtttatgtaattctgatttctaatccacacttccaactctcatctcttattcaggtgtctgctcctctactcagtagcacctggccatgtgataggttgttggaaatataaatgagtcagacattgtattagtcagggttctctagagaagcagcaccaataggctatataaatagattaaatagacaaagatttatgatggattagctcatatgattatgaaggctgagaagtcccacgatctgccatctgcaactgaaggctcaggaaagctcgtggtataattgtagtccaagcccttaggcctgagaactgggtggctaatggggtaagtcccagtcatgtctaaaggcccaagaaccaggggtactgatgtccaagggcaggagaagatggatggccctgttcaagtaaagagagtgaatttgcccctcctccttgtttttttggtcttatctggaccgtcagtgaattagatgatgcccaaccacattggtgagggagaccttctttactcagtctactgactcaaatgttaatctcttctggaaacacagtcacagacaaacccagaaataatgttttaccagctttctgggcatcccttagctcaatccagttgacagataaaattaaacagcttagacatgatgccagatctggaggaattgagtcttgagggggttgcagaacacagaaaaaagtctttacagtataccctgtcaaattcatggaaatataggaattaaaacaggttggggtgatgggaatattttaagcagcgagccgaaatcacagtgcgtaagttgtggcatacaaatcagagagcagacctgaagtgttataagattgaggctcaaaggagacaaatgttgttacagttttagcatcttgggaccttggaggtcagctggcccacctttacctgaggtctggctcttctccacagaattcttgcaaggtaatcatctaatctcggcttagtttcattgctgtatctagtgattttatgctctctgactggggagtagagatagatgggagcacttccttgtaactttgcccattgactctggttttacctatgcatctctgcttcttcttccatacaacagcccttcatatttgagctggccctttgcatattccccccaaatgaaaaaaaaaccttggattctttagccatttatcaaatggcatcttgcagtcctatcaattcttcctcctaaatatctcttgagtctggtttcttctctttacttccatagtcacttagcatggaaaataggacaaacgaccttgtggaaattagtatcaatggctctatttttaatcttcctcttctctggcctcgatgactacagcagtcttctagctggcctcctcactgccattttgccctttccacttcatttttactgtcagcagagcagtcctccccaaatgaaaatacgaccatgccatattcctgtttaaaaccattcagcaaattctcagtgcccttcatagaaacaatgaaaatctttagcatgcccctgaaggtttgcaatgtctggctctttccagtcacagctccagccttccccttggcaactgacatgctaagcgtttagaaagtattttagcatcttgattatgacatgacttctctggtcccaaggcttcatgtagatggttccctctgcctagaatctgttcctcttatctacctgaataacttctgctcatttttcaggtctgagatttgcagtaacttcatctggtaagcctacactgagtggctacccacctctttaggttagggctctgtgatagaaccaaaccaaccaaccaacctacctccctccctctgtccttccctccctccctccctccgtccttccctcccttcctccctccgtccttccctccctccgtccttccctccctccctccgcccttccctctctccctccgtccttccctccctctgtccttccctccctctgtccttccctccctccgtccttccctccctgcctccctctgtccttccctccctgcctccctccgtccttccctccattcctcccaccctccctctctccctccttccctcccttcctccctccctcccttcctttctctttctttctctttctccttcctttcttccttccttatttttttctttctctttcttcctccctctctccctcctttcttccctcccccgcatacagtaaattaggcccatttttatcatataataactcaaagttatataacatcttcaccatcagaaaggctccctcatatttcctttagtatatacttctcaaaagcaactgctcttctggcagctatcaccatagattcttgctgtcttttaaaccttgtatacctggcatcatacagtattcacgttttgcatctgactccttgcgctcatccatgttggttcatgtggcagtagattattttttccttcctgtgttattccatcttgtgatccattgtatgaatatgtcatatatttgatcattctatgcttgatgaacatttcagttatttccaattgttggctattatgcatattgctgccatgagcacacttgttttttgctgaacacgtgtgtgttagtccattctcacactgctataaagaactacctgagactggataacttataaaggaaagaggtttaattgactcacagttccacaggctgtacaggaggcaggtctgggaggcctcaggaaacgtacaatcatggcaggaagcagaggggaagcaagcatggtctgcacatggcggcagagagacagttaagtgggaagtgctacacacttttaaacaaccagatcttgtgagaactcatttactatcacgagaacagcaagggggaaatccacccacatgatccaatcacctcctaccaggtcccttcctcaacactggggattacaattcaacatgagagttggttggggacacagagccaaaccatatcacatgcatttttttcttaccttgtgatcaatttatttatttatttatttatttattttttgagacggagtctcgctctgttgcccaggctggagtgcagtggctcgatctcggctcactgcaagctccacctcccgggtttatgccattctcctgcctcagcctcctgagtagctgggactacaggtgcccaccaccatgcccgactaattttttgtatttttagtagagacggggtttcaccgtgttagccaggatggtctcgatctcctgacctcgtgatccacccgcttcggcctcccaaagttctgggattacaggcgtgagccactgcacctggcctgattttattttttgaaatacttgctgcctcttccttctgggctcttcctcactggaatgatccttgccaggaggattttactttctactcaattgtcacaagagctggccttgtgacttgctttgtccagtgaaatgtgatagaaggaatgtatgccactttggattagattaagagtcattgcgtggttctgctactgtgatttttccccctgacacgaggttagcatacaggctgacatacagaagaatgaaactggatccatatctgtcaccataggcaaaaatcaattcaaaatggcttaaagaattcaatgtaagacctgaaactataagaagactagaagaaaacccagggaaagctctcttggacatgagtctaggcaaagaatttatgactgagacctcaaaagcacagacaataaaaccaaaaatagacaaatgttactaaagagtggacagcaaaagaaataatcaacagagtgaagagacaacctgttgaatgagagaaaatatttctaaactattcactcaatgggagaaactaatatcccctatatacaagaaacagaagaaaaccaaataatcccattaaaaagcaggtaaagaacatgaatagactttctcaaaagaagacatacaaatggccaagtagaagaaaaaatgtttgacatcactaatcatcaggaaaatgcaaattaaaaccacaatgagatatcatcttactctagccagaatggttattattaaaaagacaaaaaataacagatgttggtgaggatgcagagaaaagggaactgttatgcaatgttggtgggaatgtaaactagtacagccattatgaaaagcacaatggagatttcttgaaaacgtaaacatagaactaccatttgattcagcaatcccagtctcttggatatctacccaaaggaaaagaaatcaatgtatcaaagggatacttgcactcacatatttattgcagcactattcacaatagcaaagacatgaaatcaacctaagtgtttatcaatgaataaatgtataaagaaaatatgctatatacacacaatggaattctatttggccataaaaaagaatgaaattatgtcatttgtagcaacatggatgaaatcagaggtcattatcttaagtgaactaagccagccacgaaaagacaaatattgcatgttctcacttatatatggagcaaaaaatttgattacatggaggtagagagtggaaagatagataacagagactggaaaagtgagttgggagatgggagaggattaagagaactagattaaaaggtacaatcatacagtaagatagaaggaataaattcattatttgatagcagagtagagtgactatacttaaaaaaatatagtattcaggtgatggacactgtaaataccttgacttgatcactataccttacatacatgaaacaaaacttctcatgtactccataaatttgtacaaataaaaaataaacaacagcaagaattaatacaacagactgaaatagaggctggtcctccattctgggtcctaggatgaagaacaggtggaaagagccacagctgactcacagtggacaacagtggagtgagaactaaatatttatggttacaagcaattagaacctgggaatgttttgtaatttccacaaaattttgtctaagttgactgatccatcgcctttccttgtattctcatagcattttataattctcatcataaaatggcacaaattccagtgaagtatcttttaacctgctctccacttgacccccttctaccacaccccaacctgtaagggtggagactgtatatgtcttggtcattcttgtaaacctagcacccagtactttgatgaatgaatagtaggttttcaacacatattcattcaatggaatgacttttaaccttttgttgatgggaaaatcaattttcctaggtgtgcttaccacacatagtggcctggaatggagcaccatttccctttgtctttaacttttaacagttggattatgtgtctcgatgtgaatttttggggatttatcttatttggtgtcccttgtgtagaacaccatttccaagtatgttctccttattgaggagaagatgatagctctaatctcccttcctaaggacaggctactcctaaatatatggcttaggtgacattagtctttgatagtgacatctcactgttggtccatgttgacttcactgtagactcaaactctggaatgtctccttgtggcactactactaagccagttttctcaccctggtttggggcaggttacccctggtgtacttattgatcaccatttccctctgtcgatatgcctactctcacacctttctctggagtctgagtttacttgtttgtttatttcaaccatgccttcctcactgctttctcatttcccatatctggttgttctatctcagcctgtcctccagaaaccccaaaatgctccatttcaaatcttatcacagacctctgtccacttctgattgacatgggcatttatcagcttccagcaaattgaacttcattgtgctacagtataaaggtgtcagagtgagaaatagcctggtaaaaaattagcacttgcaattttgagcagatgccagtataacttttgatttagtgatcatatttcagattctgtattttcttattgattgtagatgttctttacattttctgggtattcattcttggttggctatgtgaattataaacagctttttccactttggtcatttcactttgtttatagtatctttttggtttttttgctacatacagttttaatttgttgacctttatggttgacgattttatgatatgtgtttgttatcttttgtttaagaaattcttcccaaccatgagttaaaaaaagtgtacattttcttctaaaaatatgtatttttaatttttaattgatacataattttacatatttatcgggtgaaatgtgatgtttcaatacatgtgtacattatgtaactagcaaattggggtaattagcatatccatcacctcagacatttataatatttctttgtgatggtaatattcaaaatcctctcttctattttgagatatgcaatacctttttattgactatagtcaccccactatgcaataggataccagaacttatccttcttttctgattgtaactttgtacccattgaccaaactctctccataacccgcgcccctcacccccaccccagtctctgataaccactgttctattcattacttccatgagatcaacttttaaaaatatctggcatatgtaaaaattgtttcacattttggtctgtaatccatcttcatttaaaaaattttatgtggtataaggcaagggtgtaattttaattttactcttttccttacagaaataaaattattcccaaactttgaattgctatatggatatataatgctgttatgtacttcattcatactcatatgttccctattcttttgcaagaaactgtggttttattcttgtatcaagaccatactgcctcacttattatatcttaataatatctttcctatcttttcatgtgaatcccttttgcttgtttttctttttaaaaactgtttttgctgttcttggatttttactcttacatgaaaatattagcacaagttccatgaaaagtcctatttggattttgactagaatcacgtggaccttataaattaaattgtagagaactggcattcttataaatcttccttcttatcatattataatttgccatttattcaggtctccaaaaagtgtttcaaggatgctttgtaattttctctgtaaaatgtcacactttgttttcttagatttattcttagttgttttatgttttttgactaatgcgtatactgtttttaaaattctgtatgtatttcctaattggtgatatttggtgtataaaaataactgctggaatttttataactttgaacttaagcaattgaatgaaaatatgtattctaatcatttttagattctctgggatttcagggtagcagtcatattctagacagataatgataattttgctgtttacttttccaatctttataccatgtattttttttttggtccatttaattgactaggatcttcagaagaacagaaagggtatgtgtatttgtgttttgtttctaattttaatggaaattcttttgaagtttaaccatgaagtcttatttttactgtagctattattatcattattattattttagatatgtttttaggttaaaacctatttctcatttgctaaaattggaggattggctgttacattttattgaatacttttctgcaactatttagataataacatgtctttatattttaatatgcctatgtagtatatcacattttcaaaatttttaaaaatctttttttattattatactttaagttttagggtacatgtgcacaatgtgcaggttagttacatatgtatacatgtgccatgctggtgtgctgtacccattaactcgtcatctagcattaggtatatctcctaatgctatccttcccctctccccccaccccgcaacagtccccagagtgtgatgttccccttcctgtgtccatgtgttctcattgttcaattcccatctatgagtgagaacatacggtgtttggttttttatccttgtgatagtttactgagaatgatgatttccaatttcatccatgtccctacaaaggacatgaactcatcttttttatggctgcatagtattccatggtgtatatgtgccacattttcttaatccagtctatcattgttggacatttgggttggttccaagtctttgctattgtgaatagtgctgcagtaaacatacgtgtgcatatgtctttatagcagcatgatttataatcctttgggtatatacccagtaatgggatggctgggtcaaatggtatttctagttctagatccctggggaatcgccacactgacttccacaatggttgaactagtttacagtcccaccaacagtgtaaaagtgttcctatttctccagatcctctccagcacctgttgtttcctgactttttaatgatcgccattctaactggtgtgagatggtatctcattgtggttttgatttgcatttctctgatggccagtgatgatgagcattttttcatgtgtcttttggcgcataaatgtcttcttttgagaagtgtctgttcatgtcctttgcccactttttgatggggttgtttgtttttttcttgtaaatttgtttgagttcattgtagattctggatattagccatttgtcagatctaaaacaccaaaagcaatggcaacaaaagccaaaattgaccaatgggatctaattaaactaaagagcctctgcacagcaaaaggaactaccatcagagtgaacaggcaacctacaaaattggagaaaattttcgcaacctcctcatctgacaaagggctaaaaatcattttaaattcctggcataaattctacttggctatattttataatttttagaaaaattggattcaatggactttttaatttaggatattcatattaaaatttataaataaaattaatctattttttcttatactatctgtagaagattgtattatcattcacaattatttaattataccttccctgtgaaaggattacatattctcagtgtgacatataatgcctcctggtggctggggtatatacttcatgctcctttgccgagtttgacaataggatttacttgacccaatgtgtgtgtacattgctttgtgtcaatctcacatttttttttttttttttttttgagacggtctcactctgtcacgcaggctaggtaggactaaaggtgcatgccaccatgcctggccaattaaatttttttttaaattttttattttagagaaggggtcttgtttcttccaagtagagggtttagggagcaatatagttattctactaactctctgggtctttttctctttcacaagagcagacatgttccgcataaggaatattccttcagtttgggcccttgaatgtggaaacaaatgggacagggctgagcttggagcacaacctcagctgacctgcagcccacatggaatatgaatgaagaataaatctttgttttttgtaagcccctgagattttgggttgtcactaaagtaaagctgactaatgaattatccatacctggtttaagaatcaaggttaatgcagcctcataaaatcattcttcttccctgaaagcatttatataatgcagaaatagtctgtttccttaatgtttggtaaaatatgattgcacagccctctgaacctagtgcattttttcaggtggagaagaatttcatcaaatgattcagatttaaaaatagttattggcctattcaggtttcctatttttttttccttacatcaattttggtaatttatatttttgtagaaaaattccttctgtatctatgtcttatgtcaacaaaaacctgtttgtgataatttttatgataaaaacaaaatttatctgtattttatcatctaatgagaatattatttgtgccttatttctttttcttaatcaatgttataataagtttgtgtacataattagtactttcagagaacaagcctttttattgtcagaaatttttgtcatttggtcaaaaacattttatcaaaacatctactttttcatatttcattaattgatgctcttttatttttttctagtttttggagttttcttcctagttttaaagatgaatgcatagttcatttattttcggtatttcttaaattagcattgtaaacttggctgcctatagcagagacctgaaatagcttaaatagatgaaagttaatttttttatacttgaaaatttagagggcaggcaatccagagctggtaggataactatactttgcagaagtaaagacccaggatccttctactttcttgtttatggggtattgcttttgtctaccagctgcaagataatttatctctatgcttatgcttcagccagcatgaaggaggaaagggataagaagggcttccctcccttgaagatatgatctggaggttacatgcctcatttctgcttgtatcccattggtaagaacagtcctacagccatataaaagagacttgcaatttagcttttattctgagaagtcacatgtccagctaaaaattaagggttctcttactatgggagcaaggatactggatactggataaggggtatagtgtctgccacagtccactcctttggtatccagacatccatgtatacctatcttctcaaccattccgatgccaaaggagacactctaaaattccttgcagttattaaatccaatttgaaatctagcataccttcataatgtacagttttctccatcaggtctagatgtggctcctcatggtacagtggcttaaaatgtaaaaggtaagttatctgcctatcatatacccaatatacaacgacaaagcaggagcaggaaagcaacaataacaaatcccttttggacagagaagaaagtgaatacacaactgccagtgctaacaataatcaaacaccattgcccatccagtggcctctgattatcctctttggaggaactctttagatcaccatcctttgtgttttctggtggtatgtttttgtctgttctttcttgtgcattatgcttcctggtcgcatgtgagatgggccatgcacagtgggttctccttgtgaatcgaaaagcttttgtagcctgctttttgctggtccatgtcaagtcaattctttgtcaaatattgacaattagctctcttgtttagaaatagattcttgagcctgaagattcttgtgttactctttaaatttgctttgtgccttgttgattgtcctgtctctaacttagtggcagctaactagtgcatctgaaacaaaaacttgtgtgggaaagacacttctattaattgaatcctttcctccaggctggctacaattttctggcaggagcatcttttaaaagaaggtgttgataaagtcatggggccatggtattagcacctgctaagtctggcactacagcgccatcattcttaatagctgcattttgggtatatagaagtaattagccttttcactctgaaaagccccaaacgaccagactcctggtcaacttaggttgtaaaccacaggcagagagtgctttagtgctatattttctttcatctctgttagcacactggctagctttttttttaaacagttttttaaaatatattttttaaattgacaaattgtgtgtgctgaggacatttaaaatctactcagtaattttcaagtatacaatacatggttattgattattatcaccatgttgtacaatagatctgttgaacttattcctcctttctaactgaaactttgtatcctttgatcaacatctccccagtcccagcccctgagcccctggtatcaccattcttctctctgcttctgagtgtgacttttttagattccacatataagtgagattatgtaatacttgtctttctgtgcctagaattatttcacttagcataatatcatctaggttcttgagtttgtatctcttctttgggattttgctaagagccacaaaaaccagtcgtaccaacattctctatatattacatatttagattggtgcaaaggtaattgtggttttcgccattacttttgcttgcaccaagcaccaagagaaatgttgatcaaaggatacttattcttatagcactatagcctctgaacctatgttctatcttccaaggtaaaacattatggttttgccaaatgttttgccactgcataacaaggattatcaactttccaacctgctgtatctgagtcaatactacttatcacacagtgagtattccaatgagacacccgtttgtctttcttacgttcagcactctactttaagacaccaaaattagctgtatatgtgttcaacagcaatagtgggtttcacaagataaatgtttgcttctcatgtgagatactggaggtagacagtccaggcctgctgggaggagtttgtgctctatgaaatcttgaaggatccagggcctttcagtctttttgctccaccattcttaaggtgttccccttgccttatgactctaggagcactgccaactacagtgctcagtgtgttccggtttgcctgggactttcctggttttagcactgaaagtcccatgtctttggagacccttcagtgctgggcaaactgggatggtttgtcactattccgtttccaccccagctggccatagtgcaatataattctgatgctaccacctagagttagcctcagatctcacaagttaaggtctcagtctcgtactagactcctgtcacttcagatgccagccacaattgggggccccaggctatctgcacttctaaccaactggctatcagtctgggagtccccctgccccaggtttgataatttgttagaatgattcacagaattcactgaaagagctaaatttatgattacagttttatcataaagtatacacatagggaaatctagaaggctccccagtgcagcacttccatgccgtctgcctgtggagttagggtgtgtcacctgcccaactcaccagtgggtgctccaatcaggaacctcctcttagctttggtgtctacagttttcactggggtttcattatgtaagcatgattgattaattcattggccactagaagtgattgtattcaaactcaatctccatccctcctttccctctccagaggatgggtggctgaaagttccagccctctaattacatattggattttcctggtgactagcccctattctgaatccatctaggatcccaccataagtcacttcactagggtaatagagacactcctatctcccaggaaattcccagggttttttaagctccatgataggaatcagggacaaagactagaaaaattatttgttataccatagtcagtctgctggcatcatgtctatgttccaatcagcgggacagtgaaaagtgccaataaggcagtttgaagacatgaccagaaagctgcacatgtgacttctgtttcagctccttggccagagcttcaacactggccatgccaactacaagagaggctagaaaatgtggtctttattgtcagcagccacgtacctagctagaaagcagaggttttattattatagaaaagagggagaatagatattgatgtagagttaccagtctaagccatgtttatttggtaattgaaggcagtgctttttctttgatgtcttgcttcagctctatcctacaagattggcatgcagtattttcattgcttctcagttcaaaatacagagtatactgaatgcatattgcttttgcagcatcataaagtctaaaaatcgttaagtcaaactactataaattggggacttgtctgtattttgtaatttctcttgtaatttcctctgtataccatgggtcacttaagagtgctttttaactcaccaaacaatattttccatttaagtaagcattttcttgatttccaatttaattctgttgtcataatataatgtggctatatgatatcaattctttgaaatttattgtctttgtgacccactacattatcagtctttgtaagttttcaatgcatgctaaagaaagaatatagtctgtattggctgatggcagtttatgaaccctcatcactattctggtaaaaagtttatatctctatctttttctttaaaagtagaatcatattgtatatagtatcttgcagatttatttaaacatgtaataatgtattttaaacatatttccatataactacatgtgacttggagcacatctttatttatcaggataaactccagtgggagactgtccttcaatggtatgctttttaaaaagggttcctctaaattattgccatgattatcaattcgtcctcctcccaccaacccctgagaagggttaaaccaattttcgctcccttcagtcctgtagaacgttgcccatttcttatatcctctcaagcattattatgtattatcatattttttatctttgccggtggtcaagctgcttccttttgctgatgagacggaagcttggatatatacagcagcaggcaaaataaagcagagtgagatccaggagtggatcctgcctctcatttcctgcccaggacagagtagggagaagcgataaaatccagctgtgcttttctcttctacattcagaattgtgagttccaaaatttttttttaccctgtccagcaccaacttggctgaaattttgtgaatgatatgtccttctcctaaggggtgaatcaaacctgccaatatctgtgcctcatgcagaacacagagcttgacaatttttttttaagccaaatgtgttttcttagctggaagtaggagaaaaattgagattctctttccctggttgtgtagctcagctgggtcctagtagctctgatctctgccaagatgtttttaggatttcctttcagaaaatggcagttactgggaccacccacctatcctgggatgcaaagagatgtagctacttgaatacagaaaacaaaattacaactgaacttttctaaaatttactatttatttagttttttttttaactgacacataataattgtacatatttatgggatacatagtgatgttttgatacatacagcatgtagtgatcagatcagggtaattagcatattaatctctcaaacatttattatttctttgtgttgggaacattcagtatcctcctcctaagctatttggaagtatggaatatatgattgctaactgtatcatcctacagggctatagaacactagaacttattcctcctatctatctgtaattttttatcctttaacaagtctctcccaccctttctcccatacttcctttctgattccagttgtagcctcacaactactctgtgtgtaaagaatgacaattgctccccttttaaagatgaggacactgagggttaaaaaagctagggaacttttgttggtttgcatagctagaaagaggccttccctgacccccttgaagaggtaacctgcggttccctcagttgctagccacgttgctctattttcttaacatcaccaatcacagtgtgtaattattgccttatttatttgttcgctactatggtagacagcctcctcacttctcagtagtcatgccattttgtagtctcctcccatgttgagtcatgctggtctgtgtgactaatagagtgtatggctgagatggtgatgtttgatttccagtgctaagttataaagggcattgcagctctgctttgcttaaggaagcctgctgccatgtcatggggatgctcaaatatcccatggagaagcccacattagcagtaactgggtctcctactaacagccagcatcagcttgccagccatatgagtgagccaccttggaagtggattcaccagccccatcaagccttcagatcactatagccccaggtggctcgaaacacaatcttatgagagactccaagccagaactgcccagccaagctactcctgagttcctgaccaacttgtgatcccacttgagatatggaattaaaaatgtcagagataacaactgtgtattgttgtttgaaacaagtattgcataattttctatacatcaatagatagttaagatacttgctcatctatttccatggatagactgtaaactctgtgaaggcagggcccctgtctctctcaccactcccacatctagaaaaatgtcaagcacacagcagcaacttaacaaaatatttagtgaataaatgaaacactcaaagtagtagtgagaggattagaatcttgatgctctcatctcaccttctagcattttcccacaatactgtattgcctctcttcccttgcagagtggagccacatagccacctggggggtgggctttttcctgttgcctacagagcaattcatagttaattaaaccattgaataaacagaataagggaggatttaaaagtaatgagctgacagcccagtgtgcattatgctgggctgaaaagagaatttaatttagagaagaattatgcacaggcaaaagagcagtccgttaaaacaaagcaactgtctggaaagagataaaataaaaataggttctgcatcctgtgaaataaatagcaaaaccacacacatttggggcactttggaatcctcagagctgggatctcatgcagagtgggacagggaaacactgggcaatgcaggcaggagggcagaagtggtttcctccagttctcctgtgtgggttgcaggaggtgtcttgctggagcatagttcttgtcataggatttttttgctcacaacccacttggagcttccaaagagcagcctcgagtgtttgatccaaggattcaagggctaatattttattgagaggtgtaaggaacttgagtggataagaagggaggtaatccagggaaagaaaggccaaaaataatgaacccttaatccagctaccacagtggcaattggagcttaatcccctgggggaaaacacggagagacttttaaaacacacatctcagatttatcccagacaaagggtgagagagctgaggtacttatactcccatacccatcaatcattagttgagggctgctgtatgggccaggtaggtgagtgatacggtttggctgtgtccccacccaaatctcatcttgaattttagctcccataattcccatgtgttgtgggaggggcctggcgggaaataattgaatcataatggcagttcctcccatactattctcatggtagtgaataagtctcacgatatctgatggttttataagagatttacacttttgcttggttttcattctctcttgtctgttgccatgtaagacatgccttttgctttcttccatgattgtgaggcctcctcagccacgtggatctgtgagtcagttaaaccacctttttgttataaattacccagtcttgggtatgtctatcagcagcatgaaaattgactaatacagtgagcaaagtggcataccctgtaggcaggcctacgataaagatgcaggtgtgtcctctgttgtgcacgaaatcgtaagggggtctggaggattatgggcagagcattgaaaaattattttccaccatcccaattcctcaagaactctaaaaatttggcccctggacccccagattccaaatacccaagaggtcctctttgacttcttattacacacctctgtcccagtataaaagtcagttcccaagttctggcatttttccatcaactttcacatgctgttcattctcactatcttaattcatttacctagattattcattcactctgccaataatatttgctgccctctcagctaggtgctatatttgattcacaaagtgagcaaacacagatgtggaggtcacagactggcctttagaatccatattaacttgttaacatgttcccataaaaaacaacttgtagtgcaggactaccccaaactcctcaactgtgcaaagcaccccattatggtaagtgctagggggaagagtttgtaacaggctgatctaatctcatcttggggtatccaagaagatttctccaaagaaatgatgtttaacagataaagaaaattatcctgattctgatgaaaaattatgtaattggttgtttaatatctgccacaccttactgaaagctccatgagagtagggatcatgcctgtattaaagaaaaaataaaaatacagagatgttgggaggccaaggcaggtggattgtctgagctcaggagtttgagaccagcttgggcaacatggcaaaaaccgctttctactaaaaaaacaaaacaaaaaaacaaaaaatacaaaaaattagccaggcacggtggtgcacactcgtagtcccagctacttggaaggctgaggcatgagaattgcatgaacctgggaggcggaggtttcagtgagctgagatcgtgccactacactccagcctgcgcgacagagcgagactctgactccaaaaacaaaaacaacaacagaaaaaacaaaaatgaatctgcgaatttaacattttatttgggaatcacagagttgcaattcagggcatatgcacagacaggaggtctttggtatgtctgaggaaaaaaggaaatgttgggggttgtattaaaaaaagaaatgttatgtattctcttgaaaggcaagagaattggcgctagagaaattttgagagctggcaagctctgactagcgagtgatggtggtaggtaaaactagtctcagagtcatagcacgtcatttcagcagatactaggtgaaactggtcttagggttacagcggtcatttcagcagctgggcttgtggaatattccatttcttggagcaggtgctatgtgccccaagtcctttccccacctggcctctctactctgatttagttggctacgacaagaatgacccaattcatgcagtcaactttcacatttcctccttttgatcgagatctttttataaaagcattgcttgtgaatcatcttgaacttaggcttaattgtttctcagtgccaggatgcacttttcctggctgtctctgtcccacactggggggaaggcatgggggctatgtaaggcacccaggtcacatttgagtaataaagaggccagaagaaaaactttttgtcttaaggcaggtttgtctggggtgtcccagggaagcagggaaggggctcaaaggccctgagtgtggattctgcatgccatagcaccaggggccagtgatttccctgaggtgaatcagctttgagtctcacttctgacaccaagtaggtcaaagtcaaaagtacacaaaaaagtctctaaacttaatgttttatttgggaattacagaattgcaatttggggcattcatacagactgagtggtctttagcatatctgaggaacaaaggcaaggttgggggttttattagaaagagaaatgttccatattgttctgaaagaaagctcattggcactagagaagcttttgggagctggcaggcttttatctggtgattgagggtggcaggtaaaactagtcttagaggtatggaaggttgtttcagcagatactaggtactaatggtcttacagttgttacagcaggccatttcaacagctgggcttgtggaaaattcaatttttggagtaggttgtcatatgccctgagtgctttatccccctggcccctcaactttggtttagttgggtatgaccaaaatcacccaatttgtctaatcaactttcacacctgtcttcttcagtgccatatccctggtacctagcacagtgtctggcacacagagagtactcaaatatttgttatacaattgaaatgtttaaagtcctacttggaaaaaaatagttacatactgtattagattaggttaagctgaagtaacaaatataaccaaatatataattgttcaacacaatagaatgtctttttcaactttttattttgaaataaatttaaatttatagataagtttcaagaattgaacaaaagagtcatatactctcaactcagattcttcaattgttatcattttaccatatttgtcttatttttcactctgtcactgtatcatcatctctctctgtctcgctcttagtacagtttttctgaatcatttgaaagtaagttgcagatatcatggccaataactcctaaataattcaatgtgtatttctccaaaacaaagacactcttttgcatagcctcagtaaaaatgtaaaatcaaggatattaacattgatatggtgatactattcaatctgcagactcatttaaatcatgccggttgcctcgataaatgtctctcataagcacccttgtttttctggtccagaatttattcagggtcatgcattgcatttagttgtgatgtccctttagtcctcttcaatctgaggcagttcctcaggttttccatgtctttcatgactttgacatttttgaggagtacagaccagatgctttccggaatgtctttcagtttggctttgtctgatatttcttcatggttaaattctgattatatgtatctgtatatgttaaaaaccatgaactcacactgatgcctccaattccaatctaactcccagcctcccttttttccatatttgtatctctcttctctgacagtaagaaatctggcttccattcttctcaatctagtcacttaatttctcaattcccctgtatataatcaatctcctgattatgcagaccatctcctttgccttgatccctacacactggtcagaatcatgggccatgtcctcctgcatttctttgtgggtcttgctggacaaactcctccccacctacagtcatacaggcatgaggattccaggccttaatctccctgtggccatgcagggtaagggggcagtaacattgactccaggctctgatgctattgctactagatgtttatgttttgctcacataacagtcatgggcagatgaagagttttagggggtggcccccttctcatggtcattcaggcaggattcattctgatagaggctctgttgctttcaacatgtggctttcaggaccactgtgatactttctctcattctgctggaaggagaaaagagcatggaagggataggtggaaagtttctatagaatactctgaaagctgcaggcattccttccacttatattccattggctagaacttaatcacatggtcacacctcactgcaaggaaggctgggaaaagttgtctaactgtgtttagaaagaaacaatgtatttgcagcttcagttttaaaagtagaaggatttcatccatgggctcctagtgtctctttctatgtgtagggatattttctcccactcttagatcccaaattctttctcctattatccttttttcctgtgaagttacaagtatagtttaatattgacaaataaagtgacagtacacttctctccctccttttcctaaactttctcatccatattctttttctgattaggaaccaccaccttagtggggctaagatttcagagtggcctctgtgagttttcactgcaaacttgcaacattttcctatcaatgtctccctcaagaggggaggctctttaatccgatgaattccttgtgttgggagggtgtgcatggaatgttgcctttggaattgccttttaactttattttcctggtttaggaagcatggaaaagatattgacaatctggaattgggagttacaaagttctgagttcaaacagtgcaaagcactgttcactggctgtgtgactctgagtgagttaattcacttttctgactcttattttcttacctttaaaaaatatagttcttcatagggttgcagcaaggattagataacataatattaataaaatgctcagcacagtgcttggcacatgctaagcactcaattaaattgtagcagctgctattcttcttcctctttcagttcatttattctaagaaggttgttggaatgtgccacccacacagcattctaatatgttgttcaaatacatggattaaaagttatgctgaaagccatattctaacctctggcaggcagtaatgacctgtccacagccatgggccatgcaagcatgcactcacctggacatgggcaggggtctgcaccaggccactctcctttctgagcaccgagtgaaggcatcacaggatccagttgcagagcaggagcgcagcctccctgcagggtcagcacctgagcaaagggtctcctaatcaagtcttaggcaattaagagggctcattgtccctctacattgctggctcattagaaggtatatctttcaggacacatgagagggctcgggcagggcaatgtcctcctattggacagaccactactgccagtctggactaggctctgacaagtcccaaggaggttgtcaaaacctcctctgaactgagaactgaggacgggaaccagtgtttcccaacaatcagccatctgagcagatcctgctcctaccttggagctggatcctgtgtctctcctccttgtctgcttcccccgtaacctgggggagagaagagaaggctgagagaggacgtggagaatgagaatgctagtccctgttgccatgtgcattagcacatgctgtgctggaagtctccttgcatccttgggtgtaacccatgagatgttcagagatcatgaggttgattaacagactatattctgtttacctgggctgacctcctcagctttgtgtgtagggggaaagaaaggccactgtatttggtcctggcttaatggtgtggtttgggctgatgactcacctttcctccatgctgggggcttctgtgcagacaaagcgtcagacaaattaaccttgtagcctgacttgaaattgccttggccactgacagttatactgagctgactgcaaagacaggatctgctgctttgtgaacctggctgtgttgccatggataccacaatcccgctatccctctgactctctggggttaggaagtatccattgggagtagaggggccacgccaggctgggggaagggtgggtaaagtggtggataccaggtttcaggaggtgagattaggtgatgaactgggaaaaccccacttcctgaggtaggaactaagtccccattttcagccgggctcagaactgagtccctggaactctttcttttggagagactcccttccccaccggattccagagctggctgggactaggatagtagtggtattcgcctagcagaaatcatcagtttagcttagccaaggaaactttcagcagaatgggatcctggataactgtagccttcaaatgagtcactggtagcagagtagcggaagggcttgtgggctgtgagctgttctgccctgacttgggcaaatctgtactccagttctcttacctgaaaaatggaatgaataatcataatgcaattcctgcttaccttatgaggctgctgtgaaggtgaaaaattaatattggtgtgtgaacacactttataaactttgctaccctctgacatgggtaatctgcacttgagtgccatgatggttggtggtggtggtccctgcccctgctataaatccaggtgcctaatctggagactgaaggctagcttgatgcatccttcagctcctgcttttcctatttctattttcctgtgttatgggccagcacccctaccctctcctaaagtatcagctctgtcagagttggggaccatgcctcatcaatttttgcagcttggttccctccacccctttcctactccgtgcctctctgggatgagtacagaacctgattcctggtgggaacatgcaaatcattacacatgtagcatttaaaaaattatctcaatgtctctggcttttgtctttttgtgtttggggggcatttccagaagcagatcctgagaaaaagattcaagggcaagtagtttatttaggagttgatcctaggagccaccagtagatgagtaggggaagtggggtagggaaaagaagtcgagtcctgatggccatcttctttcctctgcacccagggttggcagaccaagacccatgggcccaatccagcccaccgcctgttctacaaatgaagtcttattggagcatagccagttcacgtatttgtgtgttgcctgtggctgcttttatgctacagcagcagaggtgggggaaggtagcagagatggtatgacccacaaggcctaaaatctttactatctgtttctttatggaaaaagtttgctgacccttgctgtaaacaaaaagctctagacaaatgattcctctattttaaagaggggtcatcagaatccagttagtagcatggtccagcaagttatcaccgtgtacaaagtgagtggggctcatccctgctggggacactgggagcgagtgtagggtatgcctcagtgttaccccacccaaggggtgagggagcagggacatttatctctcagtgcccatctgacccagggctgctgagggggacactgagtgccaggattgggctgtagttcataagcttcagtgaatgtaaggagcacttggaggtagagggagaacatgagaaatgcagatgcaggcctccaaccaggaacggtctcatgtggtgggtcagaggtgggggtggaaatgtgcattgctaagaagccctctttcaccccgatgggcaattctgatggcccctctttaatttaagacagagggatcatttgtctagagctttttgtttacagcaacggtcagcaaactttttctgtaaagaaacagatagtaaagattttaggccttgtgggtcatacagtctctgttgccatcccccagctctgctgctgtagcataaaagcagccacagacaacacgtaaacacatgaattggctgtgctcccgtaagtcttcatttgcagaaacaggcggtaggctggattgggaccatgggtcttggtctgccaaccctggggctagaggaaacaacaggggcatcaggattagattcaggtttacatcctagctctgcctgctgactagtcgtgtgacttttaggtgggtcactgaccttcattttcttcctttggacaatacagataataatttccattctcgagagttgatttgaggagaaatagcatatacattactactgacacattgaggggctcacccatggcagatttctctacaccccgctcctcttcttccaggcatgagagtccatgcctgcatacctgattagcttggtggttaatgcacgaagggagcaggctgaatttataagcttagtttcatgtgacttctcataactgccatgatccagggccactgagaagacctccctggagcaggccatcagctctgggtttaacggcaggcagagaagctacaggtgagaagagctaggtttggagtctgatggtgcctaagctctgagccacacactattctacaagagtcttaactgctcagtttggctctgagctgcctggacaagtgggaaattgtgtcaatgtcgtgattcatagaggccacatagtaaacacaaaccagctgcttaggagagtgatgctcttcctactaataaaaatgagagagatttctcctacaggctctctttgtgaacaggattcttagccctgtcatcagagcaaagacaatattgggttccatggtgctttttcttaagtcccttagtataaggaagtggctaaatgccagagtgcagttcaataaaaacaatactgtgagggccaaaacaatgtgtttcctttattctctgatggtatggcttaattcaaaggcagcacttagagtacctggaggaatggatggtctgacgctttcagacactcctccacaaatattgagctcttggtgaggtctgagtgggagcgagctggaggtcaggtgtctgggtagccgctatgctatgaagcccattaagggtagagctgtgtgctttcgactgtccactgtcctgagggcagcactgatggccattaatgaatgtcggggaacttatcaaggattcatgcctgaatataatgccaccccatctcccaaatgagatgggcctagggcaaatctaggagccagatcagggtctcgtaccacccctatacttttagtctggaagggttttttttttttgttttttgtttaactaactacctttttctatttttttttaatttttgtgggtacatagtaggtatatatatttatggggtacctgagttgttttgatacaggtatgcagtgtgaaataagcacatcgtggagagtggggtattcatcccctcaatcatttatcctttgagttataaacaatccaattacattctttaagttattttaaaatgtacaaaaaataattagaaaagaatgaacgagacctacttttctatagcacaatagggtaactatagtcaataataacttaattagcctgtaagacttttaatggggcttattaaatgttcagttcagttcagtcataaaagattacaaaatattctaatttcaaacagcataatctttcagagatcttttcaagataaatcggttttaaaatatgtaaatgcattggcttgtatcagttagcttttactatgtaacaaactatccaaaactttagcgcctaaaatcagtaaccatttgcttagctcacaatttcacagctatgtagggcccagctgagcgattcttttggtctctgctggacttagtcatgtttctgcagttgactgccagatttgctgggagctgactggtctatgatggcctcagttgagatggtttgtcttgttttacatagtccctcatcctccagcaggctagcccaggcttgttcacatggtgtctgggtaggattctgaataaaggactatgaaggcttcttgaggcctcagcttggaattggcacagttacttgtaccacattcttttattttacctttttaattaacctttttgtttcgagataattatagatttacatgcaattatgggaaataatagatcttcttactgttgattttttttaaaaaagaactctatgttttagagactagtcctcagtcagatgcgtagtttgcaagtattttcttccactctgaagcttgtctttctatcctcttcacatggtctttcatggagtaaaaaacaaaatttctttttaacttttattttaggtttgggggcacatgtgaaggtttgttacatagataaactcatgtcacaggagtttgttgtacagattgtttcatcactcaggtattaagcccagtacccaatagttatattttctgctcctctccctcctctcacccccacgctatcaagtagaccccagtatctgttgttctcttctttgtgttcatgagttctcatcatttagctcccacttataagtgaaaacatgtggtatttggttttctgttcccgttttactttgctaaagataataatgcgggaccatccatggtcctgcaaagcacatgatctcattcttttttatagctgcatagtattctgtcatgtatatgtgccaaactttcttgatccaatctgtcattggtgggcatttatgttgactccatgtctttgctattgtgaatagtgctgcaatgaccatttgcgtgcatgtgtctttatggtagaatgatttatatttcactgggtaaatacccagttaagggattgctgggccaaatggtagttctgcttttagctctttgaggaatcactatactgctttccacaatggttagactaatttacactcccaccaatagtgtgtaagtgttcccttttctctgcaacctcaccagtgcctgttattttttgactttttaataatagccattctgactggtgtgagatggtatctcattgtagttttgatttgcatttctctaatgataagtgatactgagttttttttcatatgctgttggctgcatgtgtaccttcttttgaaaagtgtccatgtcctttgcccgctttttaatggggctgtttttttttctctagtaaatttgtttaagtttctcatagatgctggatattagacctttgtcagatgcatagtttgtgttttttttccatactgtaggttgtctgtttactctattgatagtttctttcactatgcagaagttcttaaatttaattagatcccacttgtcaatttttgttcttgttgcaattgcttttggtgtctttgtcatgaaatctttgttcattcctatatctaggatggtattgcctaggatgtcttccagggattttagagttgtgggttttacatttaagtcttgagttgatttttgtatataatgtaaggaaggagtccagcctcaatcttctgcatatggctagccagttatcccagcaccatttattgaacagggagagaaaaaccctatagtcttggccccaatgctgcttcagctgagaaacaacttcagcaaagtttcaggatacaaaatcagtgcacaaaaatcaatcactagcattcctatacaccaacaacagccaagctgagagccaaatcaggaaggcaatcccattcacagttgccacagaaagagtaaaatgcctagaaatacagctaaccagagggatgaaagatctctacaatgagaattacaaaacactgctcaaagaaggaagacacaaacaaatggaaaaacatccatgctcatagataggaacaatcaatatcattaaaatgaccatactgcccaaagcaatgtacagattcaatgttattcctatcaaaccaccaatgacattcttcacagaactagaagaaactattttaaaattcatatggaaccaaaaagagcccaaatagccaaggcaatcctaagcaaaagaaacaaagctggaggtatcacgttacctgactttgaactacactacagggctacagtaaccaaaacagcatggcactggtacaaacacaggcacatagaccaatggcacataataaagagcacaaaaataaggtcacacacctatgaccatctctgatcttcagcagagttgacagagcaaatgttttcaattctgattaggttcaacttatcaattttgccttttatggattctgcttgtgatatcaagtctaagaactctgtctagctataggtcctgaaaattttcttctatttttctaaagtttatagttttatgctttacatttaagtctgctctccaaacctcagttatcttttcatataagttattttaagttaattttaatgtaagttgtaagaatttgaccaagattaatttatttttttgcctatggatgtctaattgctccataataatttgttgaaagagttatatttattctatgtaattgcttttgtactttgtgaacaataagttgagcatgtttgtgtgagtctgtttctcggttctctgatctatccattgatctgttatttacctctctgtaaatatatcatactgtctcgatgactagaaatataataagtcttgaaattgggtagactgatttatattgctttattcttcttttacaaactggtttagctattatcattcccttgtatgttcatgtatattttagaataatattgcctatatctacaaaaagtcttgctgggattttgatagtaattgcatagaatctgtatgtaaacttgaggagaattgacatctttactatgttgactcttctaattcaacatgatatatctctccatttatttaggttttctcttcatcacaggcttgtaggttttgcagtactaatcttgttcatgttttgctataattttttaaaccatcaatcataatttagaaaactcaaggggaaaagggaagtttattgtaattattcattttgttccttctttgctgatggctcaaggtttcctcttttatcatttcgtttctatttagagaaattcttttagccattcttttggagtaggcatgctggtgaaaaattgtcttagtcttccttcatcgaaagatatcttgatttactattcctttttgatgtatataaatttcagcacttgaaaatcccagtgccatttccttctgtcttccattgtttctaatgagcaatccactgtcattcaaattgattccctatagataaagtataatttctctctcattgcttgcaagatatttctgtctttagttctcacattttcctatgatgtgaattccttcaaatttatcctgttttgagtttgctcagcttcttgaatctgtaggtttatgtattttgccacatttcaaaggaaaaaaaatcagcaattatttctttgattactttttcagtcctgccctctttctcttcttcctaaagtcaaattacatgaatgttagatcttttgttatagtcccacaagcctctgaggctctgttttattgttgttgttgttgttgttgttcaatttttctctctgttgttcagactgggtaatttttatttttataatcttgtagttcactgacccttttttccttctcttttattctgctgttgagtccatatattgagcttaaaatttcagttgtattttttagttctaaaatttccttttggtttgtcttgaggtcttttttcttgcttacactttatattttttcatttgttttaagcatgttcataattgtttgctttttttaaattcagtttgagatattcctggtttttggtacgatgaatgatttaaaaaaattaaaatcaagacaatatgggtattatgagacttgggatcctatttaactctgttttagctggctttctcgggcaacactccactgggggaaggggatgatgctttattaatacaagtttggagtagaagcctaggtttcctgtatagattccattgacacctgggttcgtctcccacattcttttggccagtgcaagttacaaagcctacctagatttgaagactgaaaaaatggatactaccatttttttggtagagcttcaaagtcatgttgaaaaaggacacggacacagggaggaaaataattgtggtcatttgctttagtgattatggatatggctactagttggtaatgttgggagcagctatgaaaagactggtttcgtttgggaatagttgaactaggttatttcttctggcagtgatttgatagcagggccagttttccaatacacattcttttagtatgtgacaacgaaaccatgttatcaatttgtaagggaacatttatcttttattgccctctgtagctggtagacacaagcctgtctcatctaaaggcaaattcacattactgaaatacaagttaaagagaaaggtggctagagcacattctgttttgttcctcactgagaattttagtctcacctgttaggactctttctattaattctccatctcacattggtattagggcctgattctatagaagcatcaatatccaggggttgatacttagctcatgtagcccatgaccaatttccatctatagaggaaagagcaataaaaactgctgaaaatcttatgttgtattaccaaatttttctataagattgtcttaccagactgttatacaaggtgttagagtatataacaatagtcagtagtagaatgaatgggctcaagtgattacatctcctataaaacactggcttgcaaagatgagcgtgatccctgaggctgatccccagctgccctcattgctcattaacataagatactcccaccagtactaggatagtttacaaatgccatggcaacaaaccagaagttaccacccctttcccagaaagttagaaacaacccacccctcaatttgcattgacctgttccttaatttatatgcaatggaatgtggacttatctgagtataaatacagttgccaaggacccatacattgcctattcttggtgtactgcctatgagttaactctgcttggcaaggagcagtactgcttaatgaaagattactgtctaacaccacgggctcacccttgaattctttcctgggtggagccaagaattctcctgggctaagccccaattttggggcttacttgtcctgcatcattccctttgatcgttatgacccaggcatctcaccatggcccatcagaactcccataatcttgtctttcctgttttcctaacatacctctcatatcttccctatacacattagttttcaagaatgttttcttataccttagagtgctcttctgaaggtgtaagtggagtatttttcccccctaagtcttattcaattcctacttagttcacaagtgataccctgataaagccttagtgacccaccatgtggaattaacaaccttttcctttgtgttcgcccaccttgattttccaccattgctcctataacagattgcatacttctccatttccatgcctgttgcccccttttataaagtgaacacctctagggcaaagattgggtcttcacatttccttccttccttccttccttccttccttccttccttcctttcttttttttttagatggagtcttgctctgtcgcccaggcgggagtgcagtggcacgatcttggctcactgcaacctccgcctcccgggttcaagcaattctcctgcttcagccccccgagtagctgggactagaggcgcatgccaccacacccaactatttttgtatttttagtagagacggggtttcaccatgttggccaggctggtcttgaactcctgacctcatgatctacctcccttggcctcccaaagtgctagggttacaggtgtgagccaccgcgcccggcccagggttctcacatttctaacacagtgatggccacatgtttattgactagccaaggatctcttgaccttgatacggtttcctctgaggcaactctggaccctccactacacagagttctgaaactgtagtgccccagcccttcctgggcttcgcaaccagtcttccttctgccctaactctgtgtcccaagaaggggcacatgccttttaactactagcaaagctttgcataccttcttaattaaatttttcagatcagttcctagaagtgaaattactggttcaaagtaattttacagcttttgaaatatattatcaaattaccctccagaaaagtttatttactatttccatttccttgaacatttgctattactcaatattatcattaaaaaaccctctccaatttgctggtaaaagcaatgttctcttacagttttcttactatactcatatgggtattttacaatcttggaccttatttttatgtcctaaatttccattcatggatcttcagacattgatgtaagtgctttcttctctcttcttgactgttcctggactcctcagagttttgtcgggcaggtatgcagcttgggcttcacactagcttcagtctgtgtgtccagctctttttgaatcctccacccaacctgagttgtcatgcagtgttttggggatctcctacccctttgttcatggtgttctgttcatagctactgggaattcctccatgtcctaaaattttcatgcattaagcctgctctgggctgagctctttgtcttgtttggtattagggggagattagaaatggcctccacaggtggtgagcagagcaataactgggaaaacaagcaagatcaatatctaatcctgtgcagtcagccaaccttttcaaagcctcatctgtattgatttctgtgggtgacacttccctttcttgggtaatcagtcccttttctcagcgggtgaacgagtgagcagtacttactcctgcttttgtagaagcaagggtggctgcttaactctgagctgctggagagagggagggaggcccagagtggcttcctttgaaccaaagcccctgtgcggtggcctgggtgatatgggtatttatctagtcacattcttgttctggattgaaggctcttaaatccgaggggacagagagctgtggcttagcagaaacgtggtggagaaaaggtcagtaaattcaatggaagcgaatgagctttactaaacacccattatgacttccagtgagataagcattatcaccttcattttagataaagagtgtggttcaaggaagacaagttacttattcaaaatcacacaattggcagtgtcagaatttgaactcagaagacaccaaagtcactacacaacacgatatcctacacccttgatctgaggacccaaaatctagtgtcacatggtccagaaatacctggatgaatctcttgcggggcatcgagaagaaactggggatgtatacattttggaaaacgggacatgtcaacaaatctgaaggacgatgatatacaatagaagtgagaattttgttgttgctgcttcaaagggcaaaagtaggctgcaaatgtgaaagccacaggaaggcagattatgcttccctagaaggaaacactatgcagctgtgtattgttaacaaaggaatgggttgcactgagatcttccccaacacagaagtacatttctgcataactctgtacttcttagtatgctgtttcttcatcctggagtattgagtgaactcctattcatccttcaggactcagcacaaatgccattcgtccatgcacccatccatccaaaagtattcattgaatgctatatgccaggaaatatattagaaactggggatccatgatgaggaagacaggcatagttactggcttcctgggtttacgttgtggagtgaatctcttctctgtgtctttgacacatgcctactgaagagctctcagttgagcctcctctatggccccacgataccatgcttatgatttaacatggcagccaccatcccatatgtaataatctgtttgagtagaccctgttagtgccctatacgtatccattgggatcttagtatggtcatgtttgttgcctgatttccaattgcccgaggctttctctggcagccagagcccactctgctagcaaagcacagcaggccagaagtaccagacaataaacactctctgggagaagccctcaacaagtgcgttatgggagttggtggatgtattaagcatcctagatctcttaaccctcaggtgggataactgtaaggtgtatgctttaccctgactctgagttccccatatgattaagatctggttgtctgcagtgatcactggttgataatgcaccctatattatcattggctgtctcctttttcctgtttcactttcccactttcctattggagtttccagaaatcatttcctaaacaaagtcgttgcccttgaatcctctcagcatctatttcaagagaaacacaaataaaggcattgttaatgggtaatagtggttagaagggaaaagaatcatagcagaataaacatatttctagtccaagccagtgattgtggcatacacatcacatatgtggtacgagattttgtacagatgatggcatagtttgtatttttgtttagttagcaataaaaaatgtgtgcactgtgtccttttatcttggaacaatcaaggacaatcaagcccacccaaagagatgaagtgaggcagagcagagaaccagcatttgctttgatgtctggctgtcccacaaactctgagcttcaagcagggagcagtcatattttcttcacaactataatccataagcctgcaaaagacattgattcaaaacaggcagcaacaatgcagaattgacttgtaaattcaagtggttctgtttatgagtttcacttttcaccaccgtatttaacgagaacaccaccacaaccaacacaatttataggcaattttctgtgggtcaggcattatggttgatgctctacatacattttctaatttaaaaatcccagcttgtgaggtggttccatggtacaggtgttaatgctgtggcagttgctggtgacgccctgccccatctccccttggcccatctgagttgacctgcagctgtgattctcatcactataacagctcttcacctcaggtgcttccatctctcttctgtgcctcagggttttatctggcattatgggaacttgctgtgtagtacatagagagaatctgaaagtagaagttaaagacctcaggggtagccatcaaccagtgagagaatggagtaggcagatattctgccccagcctccctgtcctgcatgaaggttctgggggcacattttacattatttcttggagtacttcctgtgggactgggctctagtggctcacagcaggaacctgctcatgaacatatgcttgattggctttccctgcttcaccgcttcctcactggctacagaaaatcaccagcatccaagtccttatctcaaggtctcctttgaggaacccaaggtaagacaaccatcattttacaattaagaaaactgatattcagagagtataagtgacttgattgtggttgctcagttaataagtggtggacccaagatttaaacctagatctatcttgtctatgatcattcagttctatgttatatcccgaaataaagacaaaagttttattcaactataaaggtttctatagtcattcacaagcacttactacatatcaggttctctgttaggtgctagaaataaggagtgaataatggcagtgcccaaatgtccaagcattttagagtctaatagaggaagaagtttggaagtataaatagcaaaaaaaaaaaaaaaaaaagctgcagagaagagagcctatcggaaatattccagttcagtagctcaagaacacagtggaaaagtcaatggtataattattaatcacctctacaagagcaataacttggtaattatatttttgtatgttcattaagcatttaaacctaatttttatacacaatggggttataacatggctgtattagtaagttcattttgtattcactttccaaagatgttaacgctcatttaatagtttggtaatttgtctgtgtcatcctaaattattggcacaatcttcattggaggaagaagaagtatttctggaagcccagtgtacctttgatggcttgtggataaaaactgggccgctgtaaactgtcacacacagtctacacttagtccagggaaatatatacaccctcgctttttcatgagatagtatcagaaatctccaaggtatgtctcatcagtccttcacaatggccccttcggtgatcatatagtacctgtcattttcctcctctcctgtgttagctcattgtgatcccatctctgatgatgcccaaagagcattgacatcactgcatcaaaaccctgcatgctgattcctgctgaagtgttgttgatgcctaaacctggggacccatatatagactgtcagtcaataccttcccctaggccgtcaaagcagctgacaacttgtctctccatgccctgtctcttgaagaaatcttggctgtcctgcttttgactggcatgcttccaaggggggattacctgccaggactttctacctgaagagtaaaccccatgtgtcctcatttgcgaagtgggataggatctatcttcaggtctgtagtagacactctttgtgtcccaccgatatctctggctcttaccatttctgtgcatgtttgcctaacttttcattgccagtacatgcatttcttttcctggggtctctctttggctaccacaagcatgacagctcagaaatgccaaggaactaattcctgggagcagccttcagccagtgactaaagggagttattgtataaatatcccagctccttcactcctcaaatgggagaattctgcagttcaagttcaacacagtatctcagagctccccagtggtattgagctctaattgtccatggtggttcctgcttgtgacaccacacctttttactgccttctttcccttctctgtcccacttttccactcccctaccagtgtgtcctgcaatcacctcccaaataaagaacttgccctcagatttttgtcttggatgctatttctgcaggaatccaaactaagacacggggttgccgtaagattaaataccatgtgtgtgtatagctcttaacgcagtgtgtatacattagtcactaatacttgttgaataaataagtggatatatttgactctgtgaagtcttttttttttttttgagatggagtctcactctgttgcctaggctggagtgcagtggcgcgatcttggctcactgcaacctctgcctcctgggttgaagcaattctcctgcctcatcctcccaactagctgggactacagctgcgtgccaccatgcccggccaattttttgtatttttagtagagacggggtttcactgtgttagccaggctggtctcaatctcctgacctcatgatccacccacctcggcctcccaaagtgctgggattacatgcatgagccaccgtgcctggccatctgtgaaatcctacagttttacctgttgttatttctttgtggccccagctctacatttttatgactcctgaattcaacttctgtgcttgtctcaatttattaagaacagtttctagagttaaataagtctgaatctacttgttacttgttttcttctgataatactagattataaaaaattcatgagcttcaaaaggcaatgtcctatgagttacatgagagatccataacaaaaacattcacacatttaaaatagcatgagctccaattaacatatagcacacgcatcccagtaacaacagctgtacatctgctcggaagaaacgaatttggctcatctacctagtctgggctttggctcgtgtttgcataaagactcataggccaaaccctgattgtcttatcctttggaggaccaccaaattgccatgcctttaaatgccttgcaactggacttttacctttaattatatcatagatccagactgatgctccacaggctaactctggatagaagatatgttttgtttggtataaaaaatgtagtacaaattcagcctttaaaaattgagaaatttcaatgaatatatggattcatggttccttttgaaaatattgaagatctagtaaccctgggtctgaatttccacagggcaccataagcagctggtgctaaatattcactgttccttctcaatggggcatttcggcataagctcttttgaactcttacgtctgctacagtcctcaccatttcctattctcacccatctcaattctttcaattacattaactatgtttttattcatttttgttggtgaccatggcttttcagagatgaaaggaaaacagaactctttttattttgttttctcttcccaccgcctttttcttttctttatattttgaggctcaaacacacacacacacacacaaaagaaaaaaccctacttgctgaaacaggtctatagtttcagagaccttaaaaaaggattacattaaattaacactttaggaccccaaaaataaactacactataattatgttcttcacaacttagttataggattaattaattcatggtatattacgtgatagggcttggtaatgggacaaaagattaaagcatgatgaatacttgtcagttggctctgtgaatgaatgtataacaagacaattgaagataatagaaaagtggttttggacacctttggaaatggaggacctgagataaatggtcttcttgacctgtgcaatcataatccttcttttaaacacctggtttatagtcaccaatttaatgtgactattccttatctttattctgggacacttcctactctcctcggactcttggataaatttagtgcaaaaaaaatctctttggacagacttgtggttaacaaagtataaaagaggagggccttttagtatatctgttagatgattacgtgttcttcctctttgggtggaaagattttccctccaagcagctgcatgctgaataatgcacaaaggtttggtctagtcaggaatgttaaacacttgtttatctgtctctttattcaccacatccaggggggatcaagacaagaacaaacacactgctttaggaaattaaatccactcagattggtgtaaaattccttaacatcaggtggtctcaataaagctatgttctttcaatttatccatactcttttcaaactcagcatgatcccaaaatatacaatattgatggtctttaaacatagtaattcccagcaaatcccactgtgttctgagtaaaactgatcagatcctgcacatggattaggtatgccatgtctgtctttcttaattttatattctatggcgatttggctcccaaatcatgagcacactgtcagatttagtgaccaaatttctcatcaatgacaggcttgatgacactcaaatatgtcattcatttcttcctcattccaaaatacaccaacattatatatcatcattcacccaatttgacttataggctatttttaaaaaatcattctcattctgtccagacaaggttgataattcaactggaacttacatccacaggaatttaataattatcaaatttggaggaaaaattaattcccagcttggtcttttcctattttaatgctggccagtttttctgaaatttttctgtgattgttttttaaagataggatagattttagatccaatttaactttcagtttatcagcatactgttcaaagaaaatgaatgtaatttttaagttcaaattcctagtacactagagtgtggatttaaacattagacaaacgcagcactaataaaaacaacaattttcccttggctataatgccagctcttcagctttgggaagggatcacagtcacccttctttgccttatgcctgggctagctttcccaataacaagtaaatagaaccaggctctgcagctatgcacatatcttccagaaaatgtcatttcttcatcttatttctccagaatccctctgaaccaaactcctgaatcttctctttgctttatagggagcttttcagttccttcatactctatgggaaaccagcaagcaatacatgaaaagtatacaaaggaaaaaaatcaaatttatttctatcaccaccccctcccactcccacttttctccctagaggagaccagggtcaacaattttatatgttaatttctgatcagaggacgaacttcccccatcttttcttaccatgttctatttagatactgctaattcttaacaagttgaaaaatgatgtagatataaaagccaaaagaccaattatttgatgtgagagtaaccaggtcactgtcaacctgttttgagatagcatagacctgacttaaacgtagtgtgtgtgttgttttatcttgagggattcatatgttcccttcctccctcaattccatttgctccttttaggactcgcaatcttcatgctttgctacattcctcttaacttcataaatatgctaaaactcagagccaatcagagcttttctatgtgattgatagatggatgcttttggactctgggcataaataaggttgaaattgcaagcggtcatctttcccaccatgaagaaagagcctgtctgagaaagaagacaaagaccttgtaatctggtgccagaacctctgctggactttccaagttgcatgagccaatacatcccctttatttaatgtaagccagtttgagctggttttctgtcacttgcaattgaaatagtcctgatgcatatgcagaatatgtcatggttcttgtaaacatctaattgtaaaattttttcaaacatgtgtatgagactgaagcatctacatagactgaagcttcatgaagacaatctgtcttcatgtgtactgattctggataacatagaggaaactgctgaaaaagataatacacctgcatatgcaatccatggtactgcgacagcacataacagaacataacctgatgtggagatgttctggaaagatgtcctagagatgggaaaaaatgggaagctttccagggtgagctataagaaagtggggttccaggtgagagctaggttcacttcagtgcagaagaggaaagagagtttgagggtatagacacattcttcatggttcagagggttctgggtattgaattggaagggtttgggtgagacaagaacaatatggaattagggaagcagagagagaagcatagagcagtgtgggaatatacatatgggagaggaaagctaagaaggactcactaatacaatcagaaatgtgagatatggggagtattaatgaaccatggggtttcccaaatattttagcttggggtgaagggactggtggttggctcagtctataggcattaagtgtaactctgtggccttgggacagtcaagtgctcatgtccaaagatgtaccctttgattttttgtccatccatccatccatccatccatccatccctccatccctgaatccctacatccctccatccattcctctatgcatccatccatccatccatccatcttctcaaccattcatcctctcattaatctgtttaaccattatccatccctgaacatttattgagctcctgtcatgtgccagggcttatgttgcttgtcaaggagaaggaagaaaaaacaaggtttttatcttttggatacttcagtctgtgatgtaaaaaagatacgtaaacacatcattgcaataccttttgctaagagcaacaacagaaaggattttacaaagtgccgagagaaggcatgttggttgtgaagattaaatgagattaaatgtgtgaaaagcactttgtgagctattcaaatattagtcattataatcttcataacagctctggtagactggcttggattattatccacttaaaatttttttctgctataaaaatacctaaaagttccactacaagttacaaaatagagaaaataagaactcatccacatttatggtgcttcaacactgacattgttttacatgttgctaagtgtcattagtgtctttattcctggaattttattttttttcatacaacaatcatgctgtgatatggtctggctgtgtcgccacccaaatctcatcttgaattgtagttaccataatccccatgtgtcgtgggaggggaccccttgggagaaaattgaatttggaggtggttacccccatgcttctgtcctcatgctagtgagttctcacgaaatctgatggttttataaggggctttcccccgttttgctgggcacttctccttcctgacatgtgaagaagtatgtgtttgcttcttttcctgccatgattgtaagtttcctgaggcctccccagtcatgctgaactgtgagtcaattaaacctctttcctttataaattacccaggcttgggtatgttattagcagcaagagaatgggctaatacatgctgcatatatcatgattcggattgttttctctttaaattaaattgactacgttttcccatgtgtaaacctgtttcatgggtcacatctatgcaggaggagtgggagaggtcgccatggtaagagttgacatgtctctgtctcagcctcagcctaaaccccaccttcctggttcctcatgagttactgggacccttcataacaatggccacatagattccctgtccctgtcatggtcttctctgccactctagacatggagctgtgcctggtattgtgccatattactttctcctttatttttttgctgactctgtaaagcctctgtatgtctgctgatgagaagctacctttctgtcctgagctctgtccccatggcgaagggagaatgtacttttgtatccatctgaatcgcattggtggatcactttgtgcctacgttagatgtctaaggttgggggagatccatacttacctctacttcctttttaaaaaaaattctctcttaatgataatccaattagactctcattctcatcactgtgccagtacagctcatgttaaggtgaccaataaccttcatgtttccaagtccaatggctagtgctagtgctagttattatcttacttgacttaatagcaacatttgaacaattgtttacttattcctccttgaagtgtttttatttttttcacttaacttccaagataccatactcctgatagctcctcctcagccccttttgctagtttctcctcatttccttgacttctaaaggttggaatatcctaggactcaggcctgcagacatattccctatctacatttgctacttaggtgatcccactcagtctcatggctttaaataccactataggctgatgactcccaattttatcaatccaacttatagcttttctctgacctccagatccatactttcaacagaccattcatcatttccatatggatgtctaacaggcatcttaaacattacttgtccagccaactgatggttttctccccttgcttgttcttcccatgatcttccctattttagtaagtgacatgtctgtttttccaattgctttggctaaaaacattggttggagtcatcttgactgtctttcctttatgccctgtattcaaatcaccaacaaatcctgttctctctccttcagaatacatcctgaatctaaagctaaccacttttcactacttttcccactatcatcccagtttaagctaccagcgcctttcactgggttactgaagttgcctcttaactgctctcctgatttggcctttgttcccctgcagtctgttctcaacatggcagtcagagtgattttatttttaaattttacaactcacatcacatcatgccactcctctgccccccaaaccttccattggctcccatctcatgcacagtaaaagccaaaaccttgctatgaccacaaaagccaatacagtctgggccactggcctcatctcctattattttcccttttgctcatttttttttttttttttttagaaccactagcttccttgtgtattggttgttcctccaatacactggcacactcctatcttggggcatttgctgtttccttctgcctggaatgctctttcccagggcacatggcttattcctttcttccttcagatctctgtccaaatgccactcccttaaataatttgtctctgtttacctgtataccatagcaactctgtcccatgcctaacatgctctgttccttctgtttgtcttttattagacaaatcacaagctgaccatatccacatctacacacatgtatatttatgtttgtttactacccacctctcatcctagactcaaaatcccgtgccatgagatcaacggctttgtctctgtgcccatggcacttacagcgatagctggcatattagtacatgtttcataaatacatgtgtttcctgttgccaactcttatgatctcctcctatgactaggaatgtgttctttgtagcccttgactcctttcctttaatgatgtaaagtaataaaatggccaacttactcactgagcctcagtttcctaatccacatgatggatctgataatagctctcaccttatagggttgtaagacagaaataaggtattgcagctgacatcctcagcacgttgcctggttcacaaaatagattttaatgataattctgaacactatggagtcagatgaatcaggatttaaatgacttatatgcaaagcacaaatcaggatttaaatgacttatatgaaaatcacaaagtaaatgctatctaagtatgaggtctaataataattacatttgattcattttcaagagtttttgcagtccaagaaaaatgacaacttcccttagtctcaattccttatctctactatagagatgaagtagctgttgtgacaattagtaagatacagcatgtaacatgcccaaacactgaggatgtttgttaactgtttccctactgtgggacaatcagattatttcatctggaaagccattgtagacaatgctgtgatgcacatctttgtgcataatggttttcatatatttcagattatttccttaccttggaatatcaggataagtattattgagtagaaacttctagatatttttatggtctttgttacataagccagatggatttcttatcctcattttgcagagtgactctgagccttcaggttacttggctactaagtgtcagaattaagatcagagggctgggcgtggtggctcatgcctgtaatcccaacactttgggagccctaggtgggtggatcacctgaggtcaggagttcgagaccggcctggccaacatggtgaaaccctgtctctactaaaaatacaaaattcagccgggcgtggtggtgtgtgcctgtaatcccagctacccaggaggctgaggcaggagaatcgctggaatccaggaggcagaggctgtagtgagccaagattgtgccattgcactctagcctgggcgacagagcaagactctgtctcgagaaaaaaaaaaaaagatcagagcgcactcaggggctcacgcctgtaagcccagcactttgggaggctgaggcaggtggatcacatgaggtcaggagttcgagactaacctggccaatatattaatatattaatcaaatatattaatataatttctcttgtttctttcacttttcaaaatggaaaaccaaatatcatatgttctcaaagtggcagctaagctatgaggatgcaaaggtttaagaataatataatggactttggggacttggggggaagggagggagggggatgaaggataaaaggctacacatggggaaagtgtacactgctggggtgacgggtgcaccaaaatctcagaaatcatgactaaagaggttattcatgtaacaaaaaaccacctgtaccccaaaactattaaaaaatgtggacactagaaaattaaaagttacatatattgcttgcataatagggatagtgctgttctagatgctataattattaacagatgctataattattaacatttattgaccatttatgtgctagtcacaatgctaaatgtttgccatgaattattttattttcacctcaaaacaactgttttgcaaatgaggaaaccaaaaattaagtaacttgcccattcaattataagcagagcaggtgaaataaaacttgtatctgacaagcccagaggcagactgggcacttggagccaaattatctgagaaaaagtgcaagagagtggacatacttaagccaaactcatgggagacatgagaactctttacaaatacttcaaagaggccggcgttacagatcacgcctgtaatcccagcactttgggaggccgaggtgggtggatcacaaggtcaggagttcgagaccagcctggtcaatatagtgaaaccctgtctctactaaaaatacaaaaattggccaggcgtggtggcaggcacctgtagtcccagctacttgggaggctgaggcaggagaatctcttgaacctgggaagcggaggttgcaatgagccgagattgcgccactacactccagcctgggtgacagagtgagactccgtctcaaaaaaaaaaaaaaaaaaaaaaaaaaaaaaaaaaaaaacttcaaagactgtcatgtgggtggagaaataaacattccaagtggctcccaggggaggagcttgatgattctcagatggttgtttcctgccaatgtttttcttctgagctccagggtcataaatccaaataccttctcgactcacccagttgcatctctcttaggtatttctttttttaaaaattaatttttttaaagttctggggtacacaggatgtgcaggtttattacataggtaaaagtgtgccatggtggtttgctgcacctaacaacccatcacctaggtatgagatcatgtcctttgtagggacatggatgaagctggaagccattattctcttaggtatttcaggctgaacatggccaaagcttgttttggtttctttccttaaaagcttgttccaccattagggttctaagctcagtaaatgacattgacatgcatgtgagttcccatgataagaacatgggcaccatcagggacttctttctcttctttgccctggacatctgcaaactcctcaagagttgaaaaagcatacctttcttgtttctctgtttatattggttatctaaggctgtgtaacgaatgcccttcaaaattcgcagcttaaaacaatgaactttacaagctcagtttctgtgggagaggatccaggaacagctgagctgggtcctccagtctgggtctctcagaaggatttgatctgatgcttcaatcaaagcatcagctggcgctgcggtcatctgaagacttgcccggagcaaaatccactcccaagtgtgcttgtgtggttattggtaggattcatttccttgttgggcattggctggaggctcctctcggctgtttgccacatgcgcctctccatagggcagctcatatcatggccccagccttctgtcagggtgagggagagaaggctaggaaaacggaaagaggcttttgtaacctaatctccaaaatgatatcgtatcatttttgctacatttattagaaacaactcactaagtccaatctacattcaaatggaaggattacattaatatccaatgcacgaatgccaggtactgagggtcattggcagcatcttgaagctgtcagccacatatcccaaccatgactgtgatcagcatactgttggtcattgtattccattgttaccgctgtaatatcttggctatttctttctctgcagccttactacctcttttgtggttcattgtcatctttcacctggacagttgcaaaagcctcttggctggccttcctgccttctgtcttccttcttccatccatgtcccgtttctggctttgtggctgaggcaggaatgggtgatggtggtgtgtggtgagcaaggagtctagttccagactggtccattagagcatgggtgggtccatttgcagagttattacagtccaggtcaggtatgagccccagaggcatgttctgggtggtgaggaagaggacaggtaggagtgacgagagtctgagctttcacgaggagcctaagaaccctggctacaggagcaggggcttggaatagaggcccaaagcagaaggcagagctctgaatgtggcttcttattggtggttccatcttcagaatgccattctgtgactgtgccttggaaccggaattgggcaccagttgtcaccatgggccctgttgcaccaggcaggctgccgctggccgctgagtgaccacttggtccactgcagcctcatgcgccattcagcaatatcattccttccatgccttccacctgtagagacagaaggggcgagccaggagcagggctctcccaaggcctccttagtggctgtgagaaattcgctgatcttgttggacgtgtcttgccagagtcttctttccctttgaaactaaacttgctctatttttagaaagcacagaatagcagagagaacacagggtctggggcaggcaactctaagattggagtctgtctctactactgattacctgtgtatccttgggaagttatttaccttctttgagcctcagctttttggtctgtaaaatggggatagcaaagcttaccccatgagataaatatgagaaaacattcacaggtgcatacagcacagtgcttgttcaatagcgggaaatcaaatcaaatggtttgggaagagaagtatgcagagcacataggggctgcctcagaggtgggttcttcaaccacacaggtgttgtggataggatccagggcttcagggatgagaagcggggatttggcagagaaagctgtggctgatgtttctgggaggcagattttgattccacacaatgaaaaattttctgcctttcagagctttcctgaacaaagttgctttcctatggaggaggtgagtttcttgtccttagaggtgttcaagcaaagccagaatggccacttggtggggatgttgcagaggggataaaatatcagggcgatgcttgcaagagaagattgctaaggtcctttctaatccctgggaattaacatttaagagaaatctgaatgtaacagatatgacataaatacatgacagcactttcttagctgcaagtcagtgtgaggaaaggggtggtcattggatttccaaaggctggggtttgaaggcactgctgatttaggaaggaggtggagccacagctcacatttgaagggacctcctgcagctacagaaattactctttggaatagacaaaggacatattgcaggcaacctgtggtttgtagcatagctggggaaatcagcatcccaggaatggttgttacccaccacttggacaggaaatgtcacagacaaagccttgttttctgctgcaggaattaaagttcagaggcagctgcaagaaaatcaataccaagctgctaaacccttaatgaacgacagcaaaaggctgatggtgttgcctaaaacagcttttttaaagctgcttgtctggggtgagagtgttaacaataattgattgagctcctatgaggtgtggtttccagggtgcagctgcgcaatgtagggaaatgcatgttggatccaggagcagtcaccacgggctcatgtcttgcttggaagcttagtcatcgggttactgagtcagtcattagtgttagcaacttgggagtccagttgttaggcctatatgcatgcagccactcctctccacaccccactgggtcgggtcctctggcaaaagatcaatagccagatcagaatcaaagttcctgttttagccatgattgaacaagtgctccaggtcccaattcattgccctctgggagaagcagagctcgagaaacttgttctggctgctaggcttaactaggcttcctgtttcctactcacttttgcttaaatcggaggtttttttgttctgttttgtttttttcaaacaaacctataactcgacagagaaaatgaacaacctggcagaagggagggcaagggtatatggcacaccacccatcggtgaagtggagctcagtaaatgccaccccctgaatgaccccattagccattcctcctctccagggggctgaaagtgtgggtagaaatttctttcttcaggacctaggcagaaacttaaagcgttaagagaaaagatgtttcccactgggccatttaacttgtcttatttcccatttccccatctatcaagtgggcacaaaatatcctccctgttttctgtacagggttgttgtaagaaacaaatcaaattacatccatacgagtttgtggtaagccaaattgcttcctccaatcaaatgggatgtagtgcttttgtttgcgacctggaggaggaatcccaaggacagaagaaaaaacagggaactgttgttttgattaaccccccttgaatcctcacagcatccctgtaggcagatattaacattcttactttattttatttttgagacggagtctccctctgtcacccaggctggagtgcagtggcatgatcacagctcactgcagcctcgacctcttgggctcaagcaatcctgccacctcagcctgttgagtggctaggactacaggtgtgtgccaccatgcctagccaatttttttgttatttttcgtagagatgtggtttcaccatgttgcccaggttggtcttgaactcctgggctcaagcgatctgcctatctcagccttccaaagtgttgggattataggcatgagctacggtgcccagccaacactcttgtctacaaatgaggaaactgaagtagggtaatcaaccatccgggcttgcccagaactaaggggttttctaggacatgggacttgcagtgctaaatcctggaaagttctcagcaaaccaagataagctggtcaccccaaactcaagtccagaaactttgagtgactgtcttaaaccccaaggctgttgaatatcattgttggattggaatgcaggatagttaccctagtactcatgttctttcctgcacccctttctgctaacactctcattgggccgacaaaatatgcacatatgaatgagttgcaggccaagaagatgtgctaatcaatgtcatggggtttcacaggaaacagaaagctttgctacgaaggggtgctttgctgtgataccttagatctcaatcttcagtggttctcttttaagggtttgcttaagaagatacctaagttgggtatggtcatagataaagtcctgctttataagccaagtggcacattgactaacatctttattgtgatttttaaaatcttgtttggtggctcttaaactttagtaccagggccgggttattaaagaggcacatttgtggggctgccatcagctatcctgattcagtgtgtcctaggaggggcccagtaactgcatctgggtgacctggttaagtcatcccttccctctgctcttcctggaactattgcaacacccacgtaactggcctccttctctgtaaagaatccatcagtgactttccatcagctccagaagcaacccaagctctttagcctggctgacaaggttctccaggggctggccccagggtcccttacagccttctcacctgccagacttggcctgctctctggactcccgcagccttgatgtgcagataacctggctcactgtgccgctgctgcttcccggggtccctcttcattgtatggctcctcctcctccccatctttaggcattgactttctcccactctttctccaagatgccgttcaggcatcctcaacttcaggaagatgcccctggctttttcccacatgcactgccctcatggaggggaaatgcacctgatggcaataacttacacatacactgagaatgaccctgtgtggcagacacacctgaatatgtgttccaagttagagaatctgggagtggccaacctggagatttgttcgttgtctctgaggaacatctgagccccacctgtcctgtggaacactggcagtacaagggatcgaggcctcagtttggggttgaataaaggttgacaggtgtaagttgttagggaaagggtgctaagtgaaaatgctatataaactccatgccttttgcaagtggctccagtttttcttcccagcccaccaccactgggctgtgtggttctcttgtccagcccccaacctctgtactttctcccctttatgtaagcccccaataaaactctatgtctcattcgctggctctgggtctcttctttggcctcttgaacatggtgccatcccactggagtcaacaggggtttggcaaaacacccacccactttaggtggccttcggtatcatttgaataacccatcagggtctgcctttcccactgaaccgtgagtttccagagggcagaaactggttctcaattcctaacataaggaccctaaaggtgcttattgaaacagatcagaccagggtggaggcaggaggcattgtttacctggcattggctctgtgagctcccataagccatctgtggtactgattacccactctgagcacaccagatcaagacacaaggcactcagcaatactgcaaacattagtttcaattgctggggtgagaagggattagggaatagcaaactgacaacctggcttattctgagggctaaattaggaacaagattggcatgctaatgggaaaaatagtgagcctgagaggtggtgtatattagagggaatttggggatgtgacatggagctgctaaaagttaaagtcaggcgacttaaggtttagagattaacggctgctcttgacagagaggccacttggtagaatcacactctctttgtcagtccttatctcagtatttaactgtaataaattggtaaactccctaatggcaggaacttgcctattgccattgtattagtgcctggcacgtagtaacagcacaataaatttttgttgaatgaatgaccactctaaatactgctttctgcctccaccttccacagggaggtccgatctaccctaatcttttaagccaatttgcctttctctgtcctatatccttgctgcgctaggaaagcaagccccactttcaggccattctgacttctctatctttgttccagaactgcttgggctctggcctcttctctggggtaaggacctgggtcctgcctctggccccagatcctgggcttctttgtgttatttggcatctagacctggccttgcccatgtttatgggcttggtctgcatctgccaccgatatctcaggtccagttctggcattgatgttgtggaaactgccatctctactggcttcttggtgggcccctggccaggtcagccccagcccttgtgagaagaggacaatgacttcttgcaattgctgatcccagtcccagcccctgcatacctttcatctcaggctgccttccaccactgtctttaagatgttagagtgggctggctcaaacccttggcatcccggggtgggcccagtatggccctcctctttgagagttgaaaatcttcacatttatttaagaaaagtcctaggtttggttagaaaaataacaaacagaaatgaggtttctagaggcctaccaaagaaacctctgattgggctggatcagaacaggccactctggaggaattatagtcccagtgaatgttgtgtgtgtgagtgtgcatatgtgtggtgtacatggtgtggaaagctgtgtggggtgcatacatggggtatgtatgctgtgtatatgtgtgtggcatgtatacatgttatgtatatacatgtggtatgtgtgcatggtatatgtggtatgtatacatgtgggttggtatgcacaggccatgtacacatatgtatacacacgtgggtgtatgtgtggggtgtgtacatggtgtctacccctatgtatatgtgtgtggcatatgtgtgtgtgtgtgtgcccatggtgcatatgtgtgtggtgtctatcaatgtttgtatgtgtgggtatgtgttatgcagagtgtgtatatgcatgtgttgtatgtagtttgtgtatacacatgtgtggtatatgtatatgtggcatgtatacacatgtgtggtatgaatgtatggggtatacatggtccatatacatatgtgctgtgtgtgcacgtggtcctgaggtcctggccagggtgggggcacgtgcaactcagagatgtttgagcaggacatggcttgaagtgtatgtgggagccaaggtctctggtgggggaggtaggcagagcctcggaatctcggagatggagacaaagttgtggtcagccaggggagcaggaggccagttgatatgaaatgacccagagcgaggccatgggcaagggggtgctggcatctccgttctcggagctgtgtgggctgggtccgctggcttcaagggcagctctggcagggagctgggcagtgcacgcctctgctgaccattgtccacaggcatttattagcatgaggcagtgccaggccctgcatgaggtgctgaagagaactgacagatgaggttcctgttcacagaaaacaaatatgaggactgagaagctggggacggtggatggggaagagggatggggagaggaaaggagggaaggagaggcagagattcctggggctgggatggaacacaaagggtagaggctgtccagctgcttggactgaggacggggaggatcacactggaattacagacctgtgttcaatttgttccaattctccccgtcaaaacagaggtcatttctttgagtgattattaaaatactccagtgaatctggagccccctactgggtttgttggtttccccaagctaccgaatctggttccccactcactatcatctggacatccagtcggcccacaaatcccagactgctggggaagccgtattaggttatttgggagataggagcctccttttcctttcctccccccacatttcagttcctgatttttttttttttttttttttgccgtgttagcaaatttgatggatggtggcaaatgcttgaggataaaatactgtaatcaggaaagtgtcccctccctccctccctcctcctctgtccctggatctggtgctgaccgtttttgtggagtcagcagatggatggatggcttttgctgatgctttgctggagtgataggatgtgtggcaggaataaccctgcaggctcctgagaaaaagaaaaacaggaatagctcagggaagtgggggaactgagagggagaaaggggaggggagaaaatcggagtgaactggagatccctgctgtggccctgcccacagtgtctgatggtccagaccctattacccaaacccctaagttgagcaatggcaacagactcttacctggtgccttcagctccaggctcaaccccctcaatcctttcatctggcactgtgccataatgatctaaggaacaaatcccccatagtcctccctcactcactctcacaccttccatggctccctgcttcccatcaaatcctgtgcaaacaccacagtctagcatcaaaggctctctttgacatcactgcatctattagcaccccattttggatacccttgctattgtccagttttgcaaaaagttattcttaaacatggctttctggcctttgtgtgactatactcttatttctttccccatatggtcttttcctcctattctcccatcttagcctttggaaatcccatctgacctttaactctgactgcaaatgtcatatttgccatgctgactttgtaagtccccttgtcaggtaacattctgtcacctgctacagcgcttatttctcaaaaccttttgttagtattactcatgttcatgtctgtctttgccattagattgtgaacttgtgaggactgagccagatttctctctccgtggtggtctgtcctatctcatgtttaacaggtacactgtgtttagttgaaatttgttgaattcaagtacagaattgcaaaatattctacttgataaggcaaaattaatgttacagcagtttggtgcagagtgtacatttgctgaaaactgttgtcttgtggaaggaaggataagaatctgttttctagaggacttttgagcttgtcttctgaaagcctttctgtcacagtttggtagcgtatcagtcagctttttctatgctacaacctcaaactctcactggcttataacagacatttattttcttgcttgcaggtgagttgatcaagctaatcttggctccaggtcatggcttgggttcaggtctgagtcttatagttccttcttctccttggattagtaactccctggagtgtgctcttcttataatggattccaggagtgtcagaggccaaaccaaaccctaaaagcatatttgtagcctcagtttgtgttatctccacaatcctattggccacagcaaatcagatggccaagcccaacatcaatgggctgaggaaatatatactgctgaggtagtggtaggagctgcaaagtcatatggcaaaaggcttgggcgtgaaattctaataagggagggggtaaagaattggagatagcaatccaatgtacctccagtgatctcagggttggggaagaaaacccctacagaatgggtacaagaacaaagaacttaaggataaagagcagacataggagcagtagtacatagtttaaaatgcgaaggtcgatatttatgtctatgaccagattggaacttgctaaccatctgttcatgatgaaaacccttaaactctctgaacttcattttctcctgccacaaaatggagacaaaagtacaattactatacttattgggaggggagcttgtgaacaagcaggtgaaaatgctttgctagctgaaagagcccaagtaggggaagaagctaatgggagcaactgtccccagtggtcagggaaggtggagaagatgagagaggttcacggcagaacaatgcaggaacctcggtccatctcaagtccacctgcttggggcatcaaattttctgccccagccaggcaagggcttagccctaagttatgtgttctcacacacacctctgagctctgccccatcaaagtgcccatccccatctcagattctgggtttcacccaaacctatgtgaacagtgtggatagggcctctaagagtggctgtaaggatccagcactaaaagcaacagcatggtgctaggcacatggcacaggcccaatactgaaacaaaacaatacatttaccaaatgaatgtggattaatgcacacatctgtttcagacgttttctcactcagtacaattgacagaaacgccatccattcatctcttgcaggcatccaccaggatgtggaaattgcttagattaacttgttaaatccatcaaaatggtgtttattaaaatgggattttatgtgttgaccacataaatattcataactttatgacaatgcccaaacacataccactgcttctgcgtcctcgccactctgccaggagaaaacatcacgtgacaacaaaacggagcccgtgttatttacctgacagtgtgttctgataccttggagcagggctctgccaagcaggggtttttctgacagacagtatgcagctgctattcccttccccactgtcctctgcagagctagctcatggcccattttccctgctgttcctaagcacaccaagtacttgctttatccatcaaactcaagtcctttctttcaggagaaagaaatcgatagaaattgatttgaaaatgtcaaaccttatcaactgctaactgtcactccaagccagatattttaaggatggtgtagacatttgaactcaccaaggcccttctcctggctctgaaagtctatggtgccaccagtcaacctctaaatagtctctgggggcctattagagagggaggtggcatagcgcagtggctaagtgtgtaggcttaggagccagactgcttgtgtttaaattctggccccattatttaatggctgtgtggctttgggaaggttatttaacttctctgtgactcagaagtctcattttgcaccttaggataataataagatatacttcatagggcagtgagaactaaatgacaacctgtgtaagccacttataaaatatggagaatgttataagtgcaccattaatagtaatcactatttattacttatatgccactttgctaggcatcgagggttataaataaggccagttgggagaggcaaggcatacacaaggcaaatggggcacctgatacgtagagactgaagtctgaagtcctgggtttgaatatcagttctaccacttacttctccatgattttgagcagtttccctggaactgtttcacctgtaaaatggcaggtgaaaatcacagtgattgacaagccagcttgttgtatgtttctagttagaaaaccactttgagactagaaaagcacagtgtatttgttagcaattttataccagcgaaaggtcattctgtaacatggagtggcaaatgctaaatgccaaatgtgtaggacacagaaaggttcagcatcaagagagacactttgggcagagattgtcataaagggcttacgaggaaaggtgggattgaactgggctttcagaggaggcaggctttggaaagtccagaaaatactgcctggcatatacgaggcccaacttttagcaaacagagatataagcttaggagaggtcttgatttagcaaagaggaattctgaagtgacttctttttacacttggggaagcatctggattattacaatcaggtgtgttacctgatctgggtgttagtaacttcctggattttgcaaggagcctagctcagggtgggcaaaagttgaagaggaacacaaggtaggagttgatggagttggccaggtgagaaatgatggtggcttgggctaggagattatagcagtggcaatggagaaacccagacagaggcaagatcttttttggaggtagagctgtcaggactcactgatgtattcattcagtttattaattcagctgttctaggctctggggatatagcagtaaacaaaacaaacaaaaatatgcttatataggttaagtactggtgggaggtagaatgcaggggaagaaaggggagtaaaaaggatgattcccaggtttcctgcctgaggggatggagtgatatttgcttcataatgcgattttgatgccctttgttacaagttgctaaggggcatcatcttgccttgatttatccagttccttctcttctttgtgaagctctggatcttcttctttgttctttgttccatcatctgcatcctactgccagggactaatgggagtcaattctcagtgtctattaatatgccgaaaggttaccttttatataatctcttcacatacctgtacagttccatctatgatgtagatacacatggtgctgggtttaagtttcttttcccttgttatactctgcaaggtgctattcacaaccaattaacccctttgctctcttgcagggatgggaggactcatatcctgccctgcattgagtagcatgtggtagctccctggttgaatctgactttaaaatgatcccacttggacaggtgatccagctttcattgcacttgctgcatgccatgatccaaacccttctttctacattttactacataactttctatattttactacatacgtctttttgaccagccagtgttggacgaattgaactaagaagagacagaattctagaggaaatgtacaactggaacaaagatacagaggcaggaaattccaggcagagtttggggcccgcctgatgatgacaatccatttgaagactatgcttgggatgtcctgtggaagacaactagtgcttttttgagtgtctaataccagctggtgagccactttcatctccctgctgagagaatacgtggaagaagcctctcacttagaattataaaggatcctagtgaacataatttcagcaattaccaatgttcagtaattatgctaatgctgattcacaaagggctgttatttgctcagcatgttctgtgcacattatctctttacctgactaacagtgttttctcactgcagttatggtttgcttgtcatgttaagtgatgtttgcatctttgagcttgtcaagacactaggattagagccaaagtcttgttcccacccccgttacgaagattttcttgtgggcctcttgatgagaatggaaggaaaggggaaaaagcaaaaaagaagcagaaaaaggaaccctattgacttgtggggaaattatagttcagaggcgaagtgagttacagagaaacagagagctaggatttgtatcactatctttctgattcctgatagggcctctggtgattaggaaggttgagagcttgcctggtctcctctatctgtaacacaacaacagtgcgtttttttggcttgaaatggtcataccattctgagtttctgcttcaagttgtaagagtgcttagagattatctaggacagtgatgctcaaagcgtggtctttagaccagtggcatcagcaccacctgggaatttgttagaaacgcaaattcccgggttctatgctagaactagattcagaagctctcagagtttttgtgttttaacacggtcacatatgtattttttccttgagatggagtcttgctctgttgcccaggctcactgcaacctctgtctcccgggttcaagtgattctcctgcctcaacctcccaagtagctgggactacaggcatgtgccaccatgcctcactaatttttgtatttttaaaaataggcactgggtttcaccatgttggccaggctggtctcaaactcctgacttcaactgatccacctgcctcggcctcccaaagtgctgggattacaggcgtgagccaccgcacccagttggtcatatgtgttttaacaagccctccaggtgattctgatgcatgttcaagtttgagaaggatacgctaggcctttgatactggaattgtgggccatagaccagcagcatcaatgtcgtgggagagcttgttaccaaagcaacatctcaggccacacccagacttactgaattggagtctgcatcttagaagatctgcaggtgatttatatgcatgctgaagtctgagtatcactcattctactccaaatgcttccacttactgttgacaagaggcaaaatgactggtagatgttgcactaagtagtgacagaaccagactgctattactcctactaaatagctaacatttattgtgtgctttgtgagccttggagctgcttttgtttaaagagggcttactatgtgccagcattggcccctggacttttaaaaaattactttctttagagacaggtttcactctgtcattcagggtggagtgcagtggcatgatcatagctcactgcatcctcaaacttctgggctcaagtgatccttccgcctcagcctcccaagtagctgggattataggcttgtgccaccatgcctggctggcttttcccgtttaattctcaccatatccctttgaggtaggtataaaaatctgcttatctggaatgggtatttggctagataactgaaaaaaatcaattaaggcaagaaatcatacaaattatatacactttaagcatttaattttaacttaagcatataagtgtacatgcattcatgagtcttttgatgtggggggtccaggtattttccttgagtacccaggtttcctttctgctgaagtttacatatcaacgatgatccctaacttaacttgctttgaagtgggcaagaattcaacctgtgaagaaatctgagggcaggaatccttctagaattttgttttccccaaactccgaattctgtagaattttttaaaaagttatttgcctgtgcacagtattcaaacacagttttcatagatgcatagattcttatatataatatttaattaaatctgtgattatagtaacaagtataaatagcgttagcacgcttggaaccaatgcaagattaaacaactcagcttttagaagctgcagcgaatgggtgtgtcagagagtagcttattagccctgaacattctagtgccatgggtttggtcaacgtgtcttagagaattggcaatggtggttgaataccaaacagctgagctcttaacacatgttattatcactctatgaggttcagaaaggttaaggactcttctcaaagccacatagctagaaagagctggagctgggaggtagacccagccagcctgcatccagagtctctactgaactcccctgattgtctgtttaggtaaaaaatgataatcagtctttttatcttgacaaagtataaacacttctcctttttatataactataaatacttctccaaatacacgcttcttcctgccctcactgtccttctatccttaatttagaaagaaaacttggtgttcttgacagatgagcaattgaaatggatgcattaattgatttaaatgtccaagcatcaatattctctgacaaaacattgtcagtgcacagaagaccagttaatgaagaaaataaccatggaagggggaatcaattagactgaaagtttagttgaaccctttgataaagcatctgtaggtagctaggtagcatgcatttctccttccctctgttatgtccccatcctctcccatacacacctcttattgtgtaaagcattatacatccagtgaaatactacaccttatggtcctagttctgttattattcctgtgcaccatctcctttgatgtgactcattgctggttacttgccttccatgccctatatgtaaaatgggggtaagaatagtacttgcctatcagagctgtagagagatgtaaatgggaaatgcttaggacaatatcagatacattgtaaatgcccagaaaatggtagctattattgtttttccaaccctttttccctagggaaaagataaaaaagacttaatcagacatagctaagggaaagcattctgttttagctcttttggccttcttttgtaatcctagtccagtgcccacaaggctcaataaatatttgtagaaagttgaatagatgaatcgtaggtcagtgtttttccccaatctgcttctgcatctcatgatggtctatgttatacgggttgtttctctgtatcaaagccttttatacttctgtagtttcaaagaattctcagtctctccatctgcaattgcttacggtcttcatattgtcaagtacggactttttctgaactatgttttcaagggaatcttgttttcctctcatattctcagaaaaatgccaacagacaattgcctgcagaatgacaaatggctcacatggcttgttgctccgctttgttgcttggatctgagtgccctgtgatctgaggtttatgtctcttggctgcctccatgtctcactgtggttttatatcccctggctttttggcagaaacaaaacttttagatttgtcctcaactgaaaatgtttcagctgtgtgtgcaggcgtcttcatgctatagaagaaggaatggaactgtgaatggtgggaaaggctgaaggaagtaatggagaccacgatgcagaagtaggtgctcttgcaaagcagtcccgggacagataaaggaagcaaaggcagagaaccccaacgccttgtaagtaagttcttttgtcttggcggagttctaacctggagttgtctgggataggactgggatgctagaagccaggttaggtgaatatccccgtgggcaagtgaggatcacctgcagctctttttgtcttaggtggttgtgtcaagtgcctttcaagtgcctcttcaccacccagagctattctttgctgtctctctgctgtgctctgctctcttcccaggaggctgactctgatcgattgcatgagcaggttcctgtgccctttagcttcagctaggtgggtccagtcaacagggacccttggcaggagatcagaggtttggagggaggagggtatgctcagggtatctattcctctgaaggaattgcctcaggctggctgtgcctttcagtggcaggtaaatgttcccctcaaggtggctccttttatgaaattctctccttccagttctggtatctgttctctctcctcgtcattttgagcctagaaaagataacgaccacattgttactaatcccggggtactgcactgtccctgaaagcttccctataacctgcccccacctttgcaaatggttcttttattaagtcctgttcatgtgatcccagtatgagtttgtctatgcttcatgcaaggaccctggctgttacagtctcaagttgctctgcctctgtaggaaaacagtggtatctgagaggtaagagtcaaaaagataaaaatagcatggctggatatgaaagaggtggtttcagttgcaagcaataggaaacagtcccagctcacttaagtggaaaaggaattcattggtgggatattgggtatggctcatagaattgggaaggctgaggaccaggcaggaagctgggcagcagggaccacagggacattctggttaggatgatgctgctggttactgctgctgtgaatgcattctcaattgtaaatgcatctttgcttcacttccttagggttcagcatcccaggtaggagcatctgcttggccaatgctgggtcacatacaggatcctagttgcaggaaggggagaagttaaagcttctctcttccatctgcgttggcttctttccttcctcccctccccatcccaccaatagttacttctggtttctccagggctgggattgagaagagaggagacgtatggtcaggaaaggttgtacttggcgggtactgtcatgagctggtgttactagtctctgggattggcagctgttcaaagctgagtcttaactctccttgaccgaatctatcttccttctgtctggccatctggtattctatctcttctgttgggaatcccatcccagctgtttcctcccagtcattcttgggagaaatccaagatgaccctggtatggcacccctccaagggctgctcaaaacctatatttttccttagcctttggagaaggccagaaagcatttaattttatcaatctcatacagtctggctgcttgtattggaggcagtcggctggtgtaaaggttcagggtggctttagagcccactctaataaacattgagaagctttgctctctgcactcatctacacagaagctggtttgattttataaagaccaccccagaactatctatccaagctcccagacatgagccaaggtggagatagcccagaaggagacatagatggttctcttggaacagggtttctcccagaaaggattttcagacaatatagagtttctatcaatttctaccctttcctagaaaaagaataaagccttctaatgatatttaacacttctaaatttccacttagccaagaacaatggtgcccagtctgtcacaattgaccgtgttttatttgattgttatgtgagctttcattatgtttcaaaggcctcatttgccattttaaataagcatttattgttattgtatatcaacctatgaactcagggctcttagttaatcttgtctttttattttttttataagacatctgagtaaatgtaaataagggtaacttcagcagtttaggggtctcgataggtcaaactagaaccacagagactgggacttggctctagcctgatattaataagaaggtcctatcccacatgatttccgctttccctgccccactacccctgagctatgaaaggtcaagacacaggcttttgagaaaggatggaggccaaggaggactttactaggtaattactattatctcaaagaaatagaaaaggtaccaattgtcatttctttatgatactaaattttaggagagatttctaagatgttcaaggatgatgaatatataaaatactggttttattatacaaatggatcttgggataatattagtgttggaagcttttggggtctctgcctaataggaaggatttttctttttttaatttagccatttggggggtacggatgatgcagatataagaagtcaaagacattctttgcatttgaagcaaaagcatctcaaatcgctattatcttcaccattaccatcgccacccataatatcttcataaatctttatgcacattctttattactttctttagataaattcttccaggtaaaatgactagctaaaagcatatgaattttaaaacttatttttaatgaaaaattttatatattttataaaagtagaaaaaatagtgtacaaagattttaaaatcttgtaacatgcattgcttagctgccttctggaaagtaccattaagttgcaccctcataagtcttgagaattcccatatcctgacattgtgcacaggactggactttaagtgtttttgctcaattcactgaatgagaaatggcatcacattgttgttttaattttcattggtttgtttagtagtaagggtaaacatttttccatatatttttggtcatttgtttcatgatttctttatttatatactctgttcaatttgccactgcctattcctttcttactaatttgcaagaggtctttaaaatttaagaatattaaccctttttctggtaagcacattgcagttatttcaattattttctcatttgtcttttgccttccaattttcttcattatgtttcttgacatattgaaatattatatataataatatgttatatatatattatatatatatatattttgagacagagtttcactcttgtcacccaagctggagtgcagtggtgtgatctcagctcactgcaacctccgcctcccgggttcaagtgattctcctgcctcagcctcccgagtagctgggattacaggcacatgccaccacgccaggctaattttttttttatttttaggagagatggggtttcaccatattggctgggctggtcatgaactcctggcctcaagtgatctgcctgcctcggcctctcaaagtgctgggattacaggtgtgagccactttggccaaaatattacatttttatatagcaaaatcaatctagtttttactggtggttttccttactttggttacttgcttaggactcaaacatatacatttctctctctctctctctctgtgtgtgtgtgtgtgtgtatatatatatatatatatatatatacacacacaaacaaacacacatatgtgtatatatacacacacatatacacatatagatgtttttaatttacacatatagatgtgtatatctgtgtgtatatatacgtgtgtatatgtgtgtgtatatataacatacatatatatgtgtttatatacataacatataacacacacacgtgtgtgtgtgtgtgtgttgtcccttgatatatgcaggggattggtgtctgaccttccaggataccaaaatatgcaaaagtcagccctttgtattgataaaagagaaactttagttgaattaaatttaaaggagtttaattgagcaatgaatgatttgtgaatcggcagaccccagaatcacagcagattcacagagactccagcgcagccacatggtggaagaaaatttataaaccaaaaaaggaaatgacgtacagacatcggcagagaggtacagaaacagctggattggttccaggttggcgtttgcctcatttgaacacagtttgaacacttagtcctctgagtgtttgaagcacggctgctgggatttgccaagactcagttatcgttacaggcgcatgctcctaagttaggttctcaatcttgtctgactattaagctaggctacagttcatccacaaggactcaaatagagaagcacagagtccttctcagaccatattcagtttgcttcaacagtatacctgggtttctcatccctgaaatactgtattttcaatccacatttggttgaaaagcattcacgtataagttgacctgtgcagttcaaacttgtgttattcaaaggccaactgaaaaaaactacatatttaacactttagtagtttcatttcctgtatttaaaaatctttaatacgtctgggatttttttgggtatgtgaatagtacaagatagtattcttgggatttttccttttcaagtagttaaataatttgaacaatccttattaatgtagtcttttcctattgatttaaagtgctgccattattacatactaaatatttatgtctaaggctttttattgtgttcattgatctgtctaatcttgtacagtacccaagtggttttataattgaaactgtatataaggttttactttttgacgatttaccctgtctctaattcttccagccaatatttcctctttttctaaatttttggcttctctcagatgtttattccctaaacttcagagttgttcttacaattttatcaactgctttaaatttataattgatttggcataatttatatttttatatatttaagtcttgccctcaggagcattttgtcactttctcttctatggagggaaggggccatattctatggcctcggtaaggtttggatgtgttcttcataaaatgtttacttgttgataattaaatttattcttggagattttatattgttgttacagctatgaatagaatttcctccacttttttttttttttttttttttttttttacagattatggcatgtatataggaaggtactcatttttaatatgtattttgtaaccgccaaatttaatgaactgttttattagttctaatactttagagttgatacttgtgttttctaagtagaaactggcatcatttacaataactatgattctgaatatttttcaacattctttttttttcatttttctctctcttcctctctcccttttcttcctctctccttttctttctctttttccttatatttccagcacttctaggatgatgttaaggtaacaatgagcatcctaactcggaatagaaatatctcttgctttttaatttaaattacatatgataatatttcattagttattttgcaactcccagtagttgtgtatgttctatgggagtctgctcccttggctgtagctgattgagtcttttcaaggattttttgatttggaagtaaggggactaaagaagcccccttttgattgtgggagccataggactagaagtcaggaattacagctcagctagatccttgccatgtgaaggacagaatgaatctaatacagaaaactgcacccagtggagagagtgcagatggcatgagtgtctggctgcagctgcccttgacacgcagctctggggaggggatctcattcctatagttatttgagttgccccattatccttctaataaattcccaaggtaagtttaaatttggtttttggtacttctaatcctgagaatataggtcctctctcttttaaaaaatatttcttacacaattaatggtttgctggagtcgtccaatttctcaactcttctttaggaatatataaattacccaaatttactttactgaggatttcaaattgattagcagagaattatccctaattctttcttatgagtaaaaataaactcactacttaatgtgaaaaagctcatatatgttacctagtttctttctacggtattttctagtataaaacaattatactgttagaagcactgcatttgaaagattatattatgaaaaaattgtttcaatatgacaaaagaaggttaggagttagacactttcagatctacaataaattattttttctacagaaatatcaataataaaggtttatttatttttatttctgcaggtatattttgtcattgcaaatgaaaaatgaaaaaattgatttatcaataccaacagaaacaaactcaaatatctccttacttgtccttatattctcacatgcaggaacctcctattctccttgagtcaactttgaacttaaccttacacttttgcttgcagcacaatttataaaagtcaacagtaaaaaagaaccatagaatgtgaggataaatgaaagtacacattcctatgataatactcgagcactcacagcaggctgctgggtcttcttattctcattcagtagcttgtctaattttgaaccattggtggtccccataatgtatatcagttaacttttactgcataacaaaccacttcagaatgtagttccttaaaaaattcaacatgattttgtggtttggtgactggggctgggttcagctgggagattcttctggttttggctgggcagtcagctgccaggccagctcagggctggttgaacaaggagtgggctcaactcagtggcttatctctacttcacatggtctctgattttctagaaggctagcctggctttgctcacattatgatggcagggttctaagagagagggagaggaagtaaggtttcttgagacctaggcttggaactgtacaaggtcatctctgccatattctattggccacaattaagccaaaatagactcactctcttcatgacaggacttaaaaagtcacattgcaaagtgcatggctacagtgaggggtgagattttaatatctgccatataatatgaattgtgttactgtagttcacaatgcaaactgtatccccagttaatcaacaggttactttctgttgatggtgaaaaacttaccagaaggatgtgtatatgtgtatgtgttgtgtgtttttcagttttctgaatcattactttttgtttgtatttttgttaatttatatgtgtcaaacatagagtaggcatttaatagatacatgctgaataaattattgcatggtttgtctaatattttatagctaagatttgagttttaagtttagcaaatattttatattcctttttgtttaatagtaaaacatggaattaagtaaatttgtccctgagtagagatttagtcacataccataggaaatttttttaaaatttatttttatttttaatttttgtcttcatagtttgatgactgatcacaaagaggcactttagtatttactacccaggtgcagaagcagatcattgctagccttccaagaaatggcctttatgcctctattcggttgctgctcctctctcccctcaaagtaactactgtcttaatttttatgttaattacttccttgcttttccttttgattttgccagctacatatatgtacctaaacactacagtttagttttgtttgctttttgaactttatagaaatggattaatatagtttatttttgtctttctggcttatttggtttcacattatctttgtgagacttatgacatagttcactcattttaattgctgtttattttattatatgaatatactgcaatttattttttatacttttacacacatataccaccatttatttgttcatttgagtactaatgggttgttttgttaattggtctcttcagctttgggattaatgagttgataatgaataaatggtgaaatggggttgaatggcttgttttcagttttttatgattataaataatgctgttacaagcattcttttatgtttcttgatgcatgtgagcatgcattactaggggtgaagttactgggtaagaggctttgtgtgtgtttaacttcagtggtgtagtacaaactgtttcaaagtagctgtatccatgtgcactttcaccaacattgtaggagagcttccactgcatccatccttgccaacactttggcatggtcagactttttatttctagccatgctggtggctgtgtagtggcatcttgttgtttggatttgtatatctttgatgactaataagataaatcatctttttttttttttttttttttttgagatggagtctcgctttgtcacccaggctgggatgcagtggcgcaatctcggctcactgcaacttccacctcccgggttcaagcaattctccttcctcagcctcccgagtagctgggactacaggcatgtgtcatcacgcccaactaatttttgtatttttatagagacggggtttcactatgttggccaggcaggtttcaaactcctgacctcatgatccgccccccttggcctcccaaagtgctgggattacaggtgtgagccactgcactgggtgaagatcaatcatctttttacatactttttttgactggggggagattaggattttctcttttggaaagtacctagttaagtctcctgctcattcttctattgagttgactgtcttttttcttattaatttatataacttcttctcttgactttcctttttgtaatcttaatggtattttttgatgagtacaattcttaattataatcaagtccaacttatcacactttttttcttatttggttagtaatttctatgtatgatttaagaaaactttctctaccttgaggctctctgttgcattctacttttcagtttcattagtttttgctcttaactttctcatttgcttccttttttttttcgggctcaatttgctattccttttctaaatttttaagactaaatgctttgtttactgattttcagcttgtattttctttctaatataagcatgactttagttatgtctctcaaattttaatatgttttattttcattataaatcacataaaaatattttctcatttccttaatcatttgttctttgactgatgggttgtttgaagtgtatttcagtttaaaaaattcccaaacaaatggcaattatttttgctattatttgttcctgatttcaaacttaattctactgtagccagagaccttactttgcatgatgtaaatcctttgaaatttgctgactcttgcttttgtgcaggatatggtcaatttttgtaattaatgttccatgtgtccttgtatttaagtctttgtctcatgctcttctgagagaacacaggctaagatatgacagttgaatcttcattatgaaacctagactttatcaatatgtaacaatctttcttgtcctgtgtaatatgtttttgctttgaaggtactttatctgatatgaatgttgtacttatgcttttaaaatttgcatttatctaatacacatttgcccttttcatatttaacatagaaagatacttcacttgtgtccttgaaaactgtatcgttggattttgtccttgacttaattttggaatttttttcttttaatagtggaattttacatattggcatttactgttaaaactatttgatattatttccttagctttgtttcatgttttaaacttttatgcctcattgtttttctttgcattgttttaaactagagaactatatttacttcaaaaaatgccattttggaagatatattttaatcagagtagtgggtttatttaagattttcaaaaacattctgtaactgttgctttttaaatttttataactaaacatgaaattaatttttcagttttttctccttaatatgcagtgtgagcatatttttattctcttatcctcaacctcttgggttttatgaacacaatctagtgtcttgcattaggtaatcttttcttaagaataatttttgacatgtgcattgttttataaacagatttacaagcattacttagacgtatcacctttttggctgattgcagaactcaccattgtcttttaataccttgatttccccaaagttgagttgttaactatatcatgtcttgactatttagtgttcaagtggttttttaatttccagaaggatgcatggtggcacattttcaaagtctttgttgaaaatggttttgtttttgcttctacactaaaaaaggcgagttttccgggtctaaaattcttaagtggcaaacttttccagactgtgtctagatattaatctcttcattgatgcttgaaatcagatatctgaaatgtagatatccttataatcttattacagatcatttctctagtctgggaaaacattctcttctttttcttcttattgcttctgttctgttctggtatctcttgaaaatgaataagttatctttatgttgcattttgccattttctgtcctccatttctattatcttctttatcataatgtttgtcattgtctttttctccttaattctgggaaagctagtatttttaaaaatcagtatcactgaatgttttattcagtataatgttttattcttttttcttccattatttaaaaatttgttactgcgttttactttttcacttttcagacttttaacgcttttttgcccaactgtaccgagaaaaagctatactgcctaaaatgagccaggattgaggtatctctgaaagtcttttcggagactcatttactttctccccagatggatcactctctgtttggagagagaatttcaaactctgtgctttctgtatggtcctatctcctcagtatctatgaggactcttgaagtttctggcatgtatttatttagcaaatacttattgaatacctattattttccaggtattcttctaggtacttgtgatccatcagtgaatgaacagatagataaatacccctgtttttttaaaaaaaattatttgcgatagcggtaaaatatatgtaacataaaatttaccatattaaccactcttaagcacacagttcaatagtgttaagcacattcacactggtaggcatccaatctccaaaattcttttcatctttcaaaactgaaactctgtacccattaaacaacaacttaagtattttctcttcttcccagcccctggaaacgaccactttactttttacctctatggattagactactctgggtacctcatatgcatgaaatcatacagaatttgtccttttgtgtctggcttcactgagcataatgttttcaaggttcatccatgttttaggatgtgtcagaatttccttcctttttaaggctaacattctattgtatgtatatgccacattttgtttattcatttatcaataaacacataagttgcttctatcttccagcgattgtgaataatgttgctatgaacatgggtgtacaaatatctcttagagaccctgcttttatttcttttgggtacatacccagaagtaaaattgctagatcatatggtagttctatttttaattttttgaggaaccaccctgttgttttccacagtagttgtaccattttacacttctactaacaacacataggggttccaatttgttcgcatactcaccaacatttgttgttttccatttttttaacagcagccatcctaattacccctactcttatggaactcagattctaacaggagttagaagaggagagagatgacaaaaaacaaacgtaatatgccatacgttatgtagtattttataagctgatataaacatagagcaggaaaggggaggatcaggaatggtggtgggagggggtgagattggtgctaatttaaacaggtgatcaggatagctccaccagtccactgacaagatgatgagcaaagacttgaaggaggtaaggaagctgacctcaaatggaaaaccttctggtgtctagccttgttggggctgtttcttctgagtttggattttactgttcatttggacaggtctctgcgggtggggaagttaggtggggtattgtttacgtgtgcttgagaaactcccatgcctgagagccctcatctcttcttggcaaaccttcatagctggctctgtaatggggccattgtcatgctgggcccagacacagggtgaggaggtgaactagggtgaaaagtggcttagagtcaggtggctggcaagctctggaggctgctgatcaaggtcaacctgagctgggataaagagaacagggctgattgggagcatgtacaggacacaggtcaggaacaggcagtaaataaacatgaggggcacatgcaaagcctgagcataggacaggtttcaaagttccaggctaagtctgaggcccaatttgggaaatggggagagactatgggcagcttgggggatatctgtgactcatagactcattagactatgagatggggtttgagggctggtgagagatctttgtatgaccggaagatccaggtgagagactgggtgaccaagacagtcaaaaacagggtggaatttggattctgagacgtttgcccccagcagggggtgaaggtggatatatgggatatgggtggccagctggctgtagtggaaagtgaggcagcagaggggacacccgcagcagttcgctccttgacacaaaaacttctcagcccttcctcaactgtaacttttgtggaaactctcattgcctctcccggtgtgcttcctcctgcacctttctcttgagaacaggctctgcctcttaactacagtggtccagcctgagtattccatccccagccgccatgatgacttcatggtagaaatggccacagttggagaaatcagagtctttgtccaggaattttttcttttttcttttctttttttttgtaaatgaattgatactggttatttatttgtttgtggtttagtcagttaaattttgcattctttgcaatacaaactcttcaggtatcagttcctcaccatctacctcccatatacctctcatccttccacaagcttttacctatataaaggccaaatatctcctcacaatattaacaaaactttatatatatatatatatattttttttttaaattatactttaagttctagggtaccatcattctcagcaaactatcgcaaggacaaaaaaccaaacaccgcatgttctcactcataggtgggaactgaacaatgagaacacttggacacaggaaggggaacatcacacacaagggcctgttgtggggtcaggggaggggggagggaaagcattaggagatatacctaatatagatgacgagttaatgggtgcagcacaccaacatggtacatgtatacatatgtaacaaacctgcacgttgtgcacatgtgctctccaggaattttttctaatttgagctagcagggaggtcactcttgtctgtttcatggagctagaagggtgtgaatctatgattgctggtgactaaattctctgcttcttggagagagtctgtctgcagggagaggggaagagggaaaaggagaggcagagggagaaggggagggagtggggaagggggaggggagggggagagggaagggagggggagaagagggggaggtaagttggttttcagttactgaggtctcctatctgcctgtattcctaaaactctgctttgcatccttgagctacctcaggatccttctccctagattctcccttcctcccctcccttttctcccttccctccctccctccttccttccttccttccttcctccctccctccctctttctttacttcttttgtctctttctctttctttctctctctttccttccttctttctctctctctctttcactcccttccttcctctctttttctttcttttttcttcttttcttttctccttccttccttcccttccttctttctttctttttctttttctctctctctttctttttctttctttctctctctctttctttttctttctttctctctcccttccttcctttctttctttctttctttctttctttctttctttctttctttccttctttccttccttccttccttccttccttccttccttccttccttcctttctttcttgctttctttctttctttctctctctctttctttttctttctctctctcttccttccttccttccttccttctcatgctagtttgagttgaggtttctctcactcacatacaaaagtgttctgactactgtaacaagatttccaaatagtggcagcccttcttttcttgaatctctctcttttttggttttgtggctctcaggtctctcagctctctaactggatccccactctgacttctgctggccgctgtttcttctgctgctccatggtgtctttccccatgattctgtacttccctttctactttttgctttctaggcattatcctcagatagctcacccactcacacagcactaactgccactgctgggggagaccctttaacagtccaccctagagctctagtggctggtctggatgacagctacatccatataatacctcacaatggtccagaaacttattactacattgtgcaataagaaatacatgggcttttgaaactaggcaggcctgagtataaatactggatctaagcataatgaactatgagcatatcttagagatcttgcaggtttggttccagaccactgcaatgaagaaaatatggcaataaaggaaatgttttaatgaagttaatatcacaatgaagtgagtcacacacatttgttggtttccaggggttaaaaaagttatatttacactatactgtagtctgtgaagtatgtaatagcattatgtctaaaaatgtacgtacgtaattaaaatacttttttgccaaaaaatgctaatggtcatctgagacttcagcaagttgtaatcttttttgttggtgggaagtcttgccttgatgttgatggctgctgactgatcaaggcgctggttgctgaaggttgggtggctgtggcaatttcttgacataagacaacaatgaagcttgctgcagtgattgactcttcttttcctgaaagatttctctgtagcatgtatcgctgtttgatagcattttacccacagtaaaacttcttttaaaattgtagtcaatcctctcaaaccctgctgcttgtttttcaactgagtttatgtaataaactaaatcctttgttgcaatttcaacaatgttcacaacatctccaccaggagtagattcccttgcaaaagaaaaaaaaaaagcaatttttttcttacctatacaagcaactccgcatttgttaaagttttatcatgacattgcagcatttcagtcacatcttcaggctccgtttataattctagttgttttgctatttccacgacatctgcagtgacttcctccactgaagtcttgaacctttcgaagtcattcatgagagtaggaatcaacttctgggaaattcctgttaatgttgacattttgacttcctcccatgaatcatgaatattcttaatggtacctagaatggtgaaccctttccagaagattttcaatttactttgcccagatccatcagaggaatcactatggcagctatagccttataaaatgtatttcttaaataataagacttgaaaacggaaattgcttctcgattcatgggccgcagaatggatgctgtgttattaggcatgaaaaaaacactaatacccttgtacatccctatcaacactcttgggtgaccaggtacattgtcaataagcagtaatattttgaaaggaatcttttatttctgaggagcaaatctcaacagtgggcttaaaatatttgtaaaccatgctgtaaacagatgtgctgtcatccaggctttgttgtcccatttatggagcccagacagagtagatttagcatggttcttaagggcccttggatttttgaaatggcacatgagtactggcttcaacttaaagtcatcagttgtattagcccctaactagagagtcacccattccttagaagtttgaaagcaggcattgacttctctctagctgtgaaagtcctagatgacatcttcttccaatagaaggctgtttcatctgcactgaaaatctgtcatttagtgtagtcaccttcattgatgatcttagctagatcttctggataacctgctgcagcttctacaacaggagttagagaccagcctggccaacatggtgaaaccccatctctactaaaaatacaaaaatcagctggggatggtggaacacccctgtggtccccagctacttgggagactgaggcaaaagaatcccttgactctgggaggtggaggttgcagggagccgagattgcaccactgcactccagccttggtgacagagtaagactttgtttcaaaaaagaaaaaaacaacacaaaacaaaaagaagtatgcctgtatatcttgtgttttgatcaggacatatttggttgtatgaaaatccatcctcactagtaaagaggtgttttaatttagagaaataaggagcatcttacaggcatcaaagagcaagagacaaagtatataggtgggctgtggtgttcaaaaacctgtctacaaattacttgacatttcttcgtcaatagagcgggtctttttcacctcccctaaactactgctggcctccataccttgctgctgaatgtagaatgcatcaggagtggatgcctcatgacttcctaggctaggtcataaaaggcaatgcagcttctgcccggctctctcttggcagacccagggctttggaacattgagcagcttccaggaagacttccaggtttctgaaaccaccttgaaggagagaccatgtggaaagaccatgtagagatagagaaagatgcctgaggagcccaagttgtttcagccccacctatgtgatcttcccaactcaggcctccaagatgcaagtgagccatccatccatccactgattgcagcgccagccactgtttgatggcaaccacatgacagacctcaagtgagaaccacctagctggtcccagccaaccccagaaatgtgggaaataagaataatatgattattggtctttcagactgctcagttttggggtgattgttacagatcaatagataactgaacacaggttgagagtataagatttggaaagctgagtttatgccctctgtctctgatgaggctatgaggccttttgtccttgcatttttctgtgccctatgctttcttcatctgcatctctctgcagctgagatttctgttgcttaggactcctctgttctccacaacttcagctttgactcatttggctctggctttggtattgaactcctaccatctcctaccggacccaaactctggttcacttggttcagatcctcagtagagtgaacttgaccacctcaccatggtctatgagatagatttcctgggtgagatgcctcaaggtggtcaattgtggctgagagctgcgtgggtggggatatcagtgtggtagcaaggatgcaggcaggttaaaatgttttagacaaaggtgaggatgggaaggcagtggtcagcatcttaagctcagcttgaaaaatttcttttccttttttgtattcataactaaaaatttgatgttgagggtaaataggcagagatgcttaaattaatttctcagagttttggttataaaatgatgatctatgtataaaatatccaatacagatgcctggcagatgaaagacaatcaacaagattaacttctccctgccttctgcctttcttttctcctctctaaaagacaaaaaaattctaaaatccaattccttgtcttagcattttaagttgcattcctttcaacctcatcctcctccaattctctgctgaaccttgtaccctggccaaacagttcattttaaataatccaggaaataatggaagatttatcatgctttcttcatcattgcacaagtgattttcatacagtagtttctaaataaacatttcaggatggattggctgttgataattcatctagaagtcatataaatcatgatgattggtcgttcagagccaatccctgactgaccaatcatcaatttttcagtgtctgtggctgagtggatgaaattcacactctcaccatgccttacaaagccctatgtgatcttatgtctgctacctccccatcactgctcattaatcttcagacaaaccttccctttccttgttttttacacagctccttcctgcatgaaaacctccatccatactattccatgtttctgaaacattcttcctcttacctcttcacctgggtatcttctgagtcttaacttaaagatcactttctcactgcctcctccttctacatcacactaaatcatgtcccttattctatcttattatgggacctggaactttccttcactacattcattgtaatgacaataacatcaatatatatataagctgatttatatagtatctatacccaaccagactgcaaacaacttgaaggcagtggttgtgtctgtctcattcacagtcgtacctctgatgtttatcattgtgcttggctcaacatagacactgagccattatatgaataaaagaagatggtcactaacacttatatgacgcttacagcatgccaggcatattgtaatttcatttaataagattgagtgaatgagtgaatgtgcataatgtaaactattctcctgatttagaaaaaagtcagtattttaaagccttcacacactatagcacacctcctaggtgctcagtggatggtatgctatcaacttactttactgagtttgacagcactgtctaaagaactctctgagactctctgtgtagcagaagaaattacctagtgctgtcattgtgattctgagtgaaagagggcaggttgggttcaggcttttctccacgtttcagtctgtggtttgctctggtttcctctgacctgtaacactatctgatagaagattctcaaggcctgatcatttttagatgtttatttgcccctctgcttgctaagatttcatgcctatttatcacctatgctaaagaacagggctagctcaccagaaaataactgacagatgaggttgtgtaatgagaaaattagaacttcatgactcccgtgcaagcttagagtccatcgtaatagcttggagcttgcagcagcttctgagtagaagggagacctgattctaggaagaaatatgataattggagacccgggggaggtcgactgactttggccaagtaagaaattaccttcagttgttctgttactgtaattcagcaactccaattatcacaaggtaataaagtgtacatgtccgaatccattaaaggagctttaatgaaatcattatacctatgatgcctaattatagttggtattactcctatgattagtgtagggctagtgaaatataaggaatcaaagaatgggccaattaatacaatatgtgaaaattctcccatgctgcttcatgtttagggtgaggattgggcatttccctggggcagagagaagcacaaagcagaaaacagctcctctgggagggaaagaaggagtaggtgcttctaaactctggactgattattactcaagcagtgaatctgatttgaagctttctggttgccatggcaggtaaggaaacagaaagatacacaatgttcatttcttgaaaacaggcagcacacacatttatctaccaaaatgatggcattctttaaatttctgcaactttattcaaatagaaatttatcacttggcttctggtagcttcttccttctctaattcctttatggcctctcctcccgactttgagctgagcaccaattcatctcctgttcttcctccttcacttctctttttcaatctgtagaaacagggaagagtttggttgaaaattgttttttcgtcagcacagaggttcttccactgtctttctgagcctcagttttctcttctgtgaaaatggtgattatgttatctctttagcagggctgtttacataatcagtgcctattccacaaatgtgtagtgagtgctttctgtgtgcagggctgtgcttgtataacagacattgagcataatatgacatagttatcctcaactgtaagtgtaggaaggccgtgaaggcactttgttcaataaataaataaacctcttgcaaacagatatatatatatatatatatatatatgtatgtttaaaaacaggccaactactttaaatcagcaaatttcctagacaatgccagaaatgctcaccatgaagacatacattatatccctttatgtctaaggaatattttgctatacattgtcataaacacaggaatgattatgtccatgttatagatgagaaaactgaggacttgagaggttaattaacattgaatctgaattagcagcagcatgtaggaagtttatctccctggttttctcaaatgggggatgcatatgattttcataagtgctatacaattatttggggcagaatgctggttgttgacttttaaatttggatttatatcattatatgccactttctaacccctataattatttttaaattatgacgtaccataggttattgtaaacacaataaaaccccaaagtacatatgaaaagtgaaaatgtgaaaacccctgcacccatttctctcctgtatcccatcctccacagatgatcactcttcactattttggacaccttaggtagactggagattctgccagaattttgaaacattcgataatgtgatgaacctagaaatgccaaccacttcttccagtctgatgggcttcctgggggagttatgtgctaaaagcagacacccagtgggagatacaaaactgccttattagtagcagagacagtgactgatatctaccagtgcagaagtctgcactcccacttggaggcaggaagcaaagaaccacccatgtttttaatgcagtgacccggcccattagcacccttgtttaatcagtgtcttaggttttggtcagttagactggagatacctcttccctttggggaaggtaggggagagctgtggtggcggtagggtggcttgtagcatctttttttccataggattgtataaactagcctggactggagtagtagcactgttcctaccctgcagcccaggtcttcctacatccccacagttctctcttgactgcaagccatagaaagcctggccagcagcatttgcaccagctccagcatcttatctcccggcttctctgggcagtttccctctagacctttcctggccacagtctggcttctgactctttaaagaccccaggtacccacccagtgtggtgtggtgctctttgaaatgcctcttctctcagccttcattttcctcccaggtttgggatcggaaactcctgactttggtgctggaagacaggctgttctgtgttctcgagtaggaagtgtctctgccaggcttgagctggcttaaaatggatctgccatacattgatagaaaagccttttggatctgttcatgcagttatcgctcacaaactatcttgtagtgtctatggtgatgccagttcctgtgtgtgtatgtggccaagtaggggtgggttgtttacatatatgaatcaggatctttcttctccacgaaatttatttcattcattcagaatttactgagcatccaccacatggcaaatgctgtgtacctacgtgctggacatatagaggtgcaaacaaagtctcatgtctttcctcacatgtcttagacactagcggagaatagagacaaaaaagtaaacatgcggctgggtgccgtggctcatgcctgtaatctcagcactttgggaggccgatgctggcagattacttgaagccaggaatttgagaccagcctggccaacatggtaaaaccctgtctctacaaaaaatacaaaaattagccaggtgtggtagcacatgcctgtaatttcagctacttgaggggctgaggcacgagaatcacttgaacccaggaggcaggtgttgcagtgagccaagattgcaccactgcactccagcctgggtgacacagtgagactttgtctcgaaaaagtaaaaaaaaaaaagaaagtaagcatgaaaatacaaaccatgatcgttttatgctatagatacaagaggtttctacttacaaagttgtattcacatttcttgagacagtgtggtgtggttggcagtgcatgaatagcttatctacattttctaagctttattttgtattttcaactacaaatttaaggtcctagcttgaattgaatcatagctggtaccacttgtggaggtttctttctaaggactgtgcctaaggtgaaaactgagcgtagtcaaaatttcccccttaaaaacaattacaaatcctttcaatcactcacaaagtccaacatatacatagttttctgtatacattacaatgtataaattcataatttaagcaattcatgggcaatcatatatagtatttgagttgatatgcaaattttaattttgtactgtatttgtaaatttttaaaaatggctaaactatgaaattactaatatttgaacatttttaacctatacaaattataatttcacctgatccaacccaataaataactatttttctcttttgccttatacagcattaaattgatgttattctatatgggactctaactgcaaagaattgttccagagatatcatttttggggtgatagaaatattctaaaaattgggattgtggtgatggttacacaactctgtaaattcactaaaagtcattaatttgaacacttacaatgagtgcattttatggtatataaattgtgcctcaataaaactattaaacaaaatgaaagagctcaagactagacacatggatgaggtctggtatatggagttttccatgatgcctttgatgaggtatctcacaacatcccttttgagttaagtcaggtctggctactctgtataaggaaaaggctcagagggataaggtgactgagccaaggtcacacagcatgtacctagcagagcagggatggaaataccatctggcactgagacactaggctgattccatttcttttcatgcaaccgggattgggggagctcccttccttctcactatccctctgaatgctctgacatggtttgctccaaagcatatcttgggaactgagcagcctgggagtggaatgactgtggaaaatggatttgcacaactgcctccctgggcagcccactttggaaaccatttgtgacctgtaattgaccatgacgatataaaaattggaagctgaaaattacaaacatgtgaggttattagatggtgaaattgcagcttcccatcagcctgctgcttcctgaattctcagttttgcttttgggggctagagcttggcaaatcctcatgatacaccccctcccttgcctgaatgtgctccaggctacctgtttcccctgctcaggggaaaaagaacaagaaccctgatacccagctgggtgagccactaagcagaggagagaaaagcctctacttgtcccatcaggttctatcacattgcatccctttgaagctgtgcatctgatctgagtcatcatcagggctccccacttgcttggcctgacaagggcttgcaaggcctccagttacctctctgacctcatcaccctcactctaaccttaatctctccctgctcacgatgattgactaacctggctattcctccaaagtgtcagcacactcctgcctccacatgtttgcactggccgtgccctctacctgagatgctctttcctcagacatcttcatggccagctcctgcaagcctttggccaaatgtcaccctttcaatgatgtctaccccgactaccaggctctatcagccacccccagttccttatctccttactctgcttaattttttcccacattgctgattatcttccacaacaacatatcatataatttacatatcccatttaggattcattgtccacttttctcctggggatatcagctcctcgagggcagtgaaagtgcctatttgtttactgatacatcctaagtgctcacgaagagtgcaaattaatctccaataaaacttcgtggcatctttttttaatgacagctttagtgaggtataattcacataccatgcaattcacctatttaaagtgtgcaatttaatgttttttaggatgtttgcagggctatgcaaccatcaccacaaattgaacattgtcaccaccctcaaaagaaaccctgtaccctgtagccatttttcatttctctctaacctcctgttaggagaggcagccactaatccactttctgtctctatagatttgcctctttgaacgtgttatataaatggaaccatgcagtatattttgaagctttaaccatgttgtagtgtatactagcactttcattttagagctgaataatattccattgtgtgagtatattgcattttattgatatattcattagctcatagatactagggttatttctactttttgacttataaatattgctgctatgaacattcacatataagtttgtgtgtggacatatgttttctattatcttgggtatatacctaggagtggaattactgggtcatctggtaactctctatttaaccttttgaggaactcccagattttttttaatggctgcaccattttataatcttaccagcattatatgagggtcatgttatgtgttttaaaagttaaacacctcagtcaacaaagagatcctaaatgttttgctgaataaaatattctgatgtcattcaaacacatgtcactgtgtttctttcaaataggtatttttgagatgacttttctcccttctcccttctctgtgtgtttcagactcccattccctagaaacattgtgaaagaagtcttgggaattcgcagggatacaaggatgcctttgaaactgatgtattaaactaaagtgaggtggtcctggcctctggtggctgagcacttttgtgcagtgtggcccttataaataacagggcctggttgtaaattgtgattctgtagtctttttccacaacgtgtagaacagtgctgtacataaaagtggaacttggacataacaggtgttcagttattatgttttaaataactggctgaagtaatcatggcaggtgtactctcagatgttgggagtgctcaaaatcgacttacttcctcaaatatttgttgttccttatagtgatgagggtagagcaaacattgttggtgccatgctcagatccccctaccttcagcccacaccagaggttacctgcaaactcttccggtatgtggtggcagctctgagtctctgtctgagggcattttttggtcacagatggttgttcaccatgcatttggagcagccacaatttctggggaccccaggaacaactcaatcaatgagggctggaagttggtgataaataccccagcttacttgccagccagttgaggaaaaatccttggatgtaaccacagtctcaggatccctactgggattgggcccagtggcccaaagtgggaaccagccctcttttctggcttacttttacttcctgtcccattccccactccctcttggggctattgggataacatcacaaatacatgactgtcacctgaatccttgtcttagcgtctactcctgatgaagcccaacccaaggcaacccttaggattttgtattcatggactacctggctggtcagcagaaagcagctcctggtctgtggtagtcctgctgggcatctggcagtgagtaaagatttgatttgaatttgcatgtcagagatttggaattgggactaatcagctgtgactggcgattccaggaagcaggaactagagggaggacagatggtattatgagtgcttgtgagggggtgaggcagcatgtgggagggacaatctgagactcagggattatgcagagtgtccctcaccaggagtattagtttgttttgcattgctgtaaaggaatacttgaggctgggtaatttataaagaaaagaggtttatttggctcatggctctgcaggctgtaaaagcatggtgtcagcatctgctcagcttctggggaaacctcaggaagcttacagtcatggtggaagggaagggatagcagccatgtcacatggtaagagagagaggaggaggttctagactctaactctttagctcttgcatgaactcattacaaaggtgagagcaccaagccagtcatgagggatccacctccatgacccaaaggctcacttccaactaaggatcacctccaacatttgggatcacatttcaacatgaaatttggaggggacaaatatcccaaccatatcactctgcctttgggcccccagatctcatgtccttcaaacattgcaaaatacaatcatcccttcccaatagtcccccaaagtcttaacttgttccatcataaattgaaaaatcgaaagttcaaagtctcattttataatcaagggaagttctttccacctatgaatctctaaagttaaaaacaagttatttacttccaagattcaatggtggtacaggcaatgggaagacatccccattctaaaagggagagattggccaaaagaaagggcaacaggccctgtgcaagccccaaaccgagtagggcaaacatgaaaccttaaagctccataattatctcccttgactccatgtcctgcacccagagcacattggtggaaggggtgagatcccagggccctgggtagctccgcccttgtggctttgcaaggtgcagcccccaaggctgctgtcatgggttgaagttgagtgtctgtagcttttccaggctgaagttgcaagctgctggcggctctattgttcttgggtctggaggatggcagctccttctccacagctccactaggcagttccctggtgaggactctgtgtgggggcttcaaccccacattttccctccacactgccctagtagaggctctctgtgaggacttcacccttgtggcaggcttctgcctgggcacccaagctttctgttccatctgctgaaatctaggtgaaaggaaccaagcctccttcactcttgcattgtgccagcctatagacttaacaccacacagaagctgccaaggcttatggtggcttgtgctcttcaaagtggcagcccaagctgttccaggtaccctttgagccacagctggagctggggcagctgtgatgggagtagcagtctcccaaggtgacacagggcagtagtgtcccaggcctgggccctgaaatcattctttctctggactcgtgatgggaggggctgtttccaagatttctgaaatgccttcaaggcttttttcctattgtcttggatattagtacctggatcccttttagtcatggcaatctctctagcaagtggttgcaccacagcctacttgtattcctctcctgaaaatgctgtttctctatgacatggccaggctgaagactttccaaatgtttgtgccatgcttccttttaattagagagaaaaaattggtaccaggagtgaggcatttatataaagatacctgaaaatatgaaagcagctttagaactgggaaatggcaaaggttggaagattttggagagctcataagaagaaaataaaatgagggaaagtttggaacttcttagagaccggttaagtagttgtgaccaacatgctgatagaaatatggatggtgaaggctaagctgaggcagtctcagatggaaatgaagaattattggaaactggagcaaagtttgcccttgttatgccctagtgaagaacttggctgcattgtgcccaggtccaagcaatttgtggaagggtgaacttaagactgatgatggaagactaatggaagaaatttctaagcagcaaagccttcaaaatgtagcatggctgcttctgacaacctgtgattagatgtggaaacaaagaaatgacttaaaattggaacttatatttaaaagggaagaagagcgtaaaatttggaaaatttgcaagctggccatgaggtagagtaggaaagagtattttcagaagagaaatacaagttggctgtgcagcaaccacttgctagagatatttgcaagagtaaaagggagccaagtgctgaaaacgaagacaatggaaaaaaggcctcaaactcatttcggaaatcttcgaggcagcccctccaatcacaggtccgaaggaaagaatggttttgggagtcagacccagagtgccactgccctgtgcttcctcatgacactgctcttcacatcttggcagctgtggctccaatctcagctcaaagggtcccacatatagctcggggctgctgctctgaaaggtgcgagccgaaagctttggtggtttccatgtggtgttaagtcttcaggctggcagaatgcaaaagcgaaaaaagcttggaagcttccacctagattgcagaggatgtgtcagaaagactgagtgcctgggcagaagcctgccacatgggtggaacccccacagagagcctctactagggcagtgtggaggggaaatgtgggattggtccccccacacagaatctccaccagggaaccgcctagtggaactgtgggaaggaggctgccatcctccagacctgagaaagctacagccaccagcagcttgcaacctcagcctggaaaagccacaggtattcaactccgacccatgagagcagccttgggggcagcaccctgcaaagccacagaggcagagctgccaaggccctgggatcccaccccttgaaccattgtgctctggatgtgggacatggagtcaaggataattttggagctttaaggttcaatgtctgccttgctgggttttggacttgtgtggggcctgttttccctttctttcagctgatttctccctttcagaataggaatgtttacccaatgcctgtatcaccactgtatcttggaagtaaataacttgtttttcattttacaggctcacagctatatcttgagtttcagaagagatttggactttggatttttcagttggggctggaaggagttaatactttagggaactaaaggatgattgtattttacaataagagaaggatatgagatttggggcgggggagggggtcaaagacaaaacaatatagtttggatgtttgtcccttccaaatcttatgtcaaaatgtgatccccaatgttggaggtgggcctatgggaggtatttgagtcatgcaggtggatcccttatatcaaatacatttacacaactaattaagaataaaggatgaaatggattgtaaaaccttatggactgtgtgtctctgctcagatgtcagttttgtgctaccctcatggtaagttcttgctatattagttcttagagtaagttctggctatattagttcacacaagatctgattatttaaaagagtgtggcacttcctccctctgtctgtctttctccttctctttccatgtgacatgcctgctactccttagccttccaccatgattgtaagcttcctgaggcttcacagaagctgagcaggtgctggtaccatgcttgtacagcctgtagaaccacaagccaaatcaatctctttataaactatgcagcttcaggcattcctttatagtaatgcaaaatggactaacacaataggacagtgggaggaaggtacagatatgtgtggtcaggcacctgtagattcagtcatccctgcatgcaggactggtgacacaacttgtggggcccggtgaaaagtgaaaatgcagggacctgattgaaaaataattgggaatttcaatatggtgatagcagagcattaaaccaagtgtgggtccctctgtgcatgggccatgtgagactgcacagggcccatgcccatggagttggtcctacctaaatatctgaatctccctcagacccacatttatgcccccgatgtttgctttagaaacatccttgcaatctttgctctgccaggctggaccctcctcactggcccctctgcccccaggcattctgccttccaatgcacccttcatactgcgcatagaatgattgttgtaaaacacagctgtgatcactttacctctgtcctcagaagtctttaatagcaccccactgactgtggctgtggtttgaaaatcgtgatgggcaggccccctcgggtgctctgagcctgctgctgagggtgagagaggttgtgctcgctgcttctctcattcccattgcaaacacagcagaaccattttttatctgttttgcatatatattgggcttccacataagatttcatttgagaacaagtttctactcctaaaataaaaatcatttgggaagctactggccgcagaattaaatccaagcttctgagcttagcatttaatgtcctcgatgctctatgttagaggttggccattttaggcccatgggccaaatccaacccatggctaagaaggatttttgcatttttaaatagttacattttaaatgattttgtaaatacttacatgatacattatcccccatttggcctcttggcctgcaaagcttcatatttactatctggccctttaagagaaagtgtactgattcctgatctagctccattatttccttccacatttaacttttaggattccagcacatttaccctacagagcctggcttagtaccttacaaagctaggacaattatatgcctggtttgttgtcctggcatcattattcatattaatagagcccttttcactctcctaagtgtctttgggaagtaaattatattgtcatcctacatataactgacaaatgaattgaattgaaaggaagatcaaaaaccaccagcacattttgtgacaaagtatattatgtttgatacttagggcatctcctgaagaggttccaagttttgtctgtttgagctaatacccagaaatgacaagcattataaaaaagaatggccttaaaaataattactatgcttctgttatgtatgtgatggatttctagcactaacgacatcttcgcttgcctaattttcttaaaaggatttaaccaatctatctgatttttaaaagcagcatgaggtatgttaacagaaacccatattgggacacaaatgcagtctcgtgctaggtattgaatattttgtttagagaaaggctatatttagggagtgggggaggagttgtcctttcatctgatattctaggaaatgaactatttttgctactttctgtgcctggagcacagcatggatgtttatctgtaacaggcccaacttttagaagatgccaactccaaatgacctggatattatccaactaagtgcttttaaattcccagtaataactaaccaagcatgaagaataactcaattttggatgaatctaatcttatttataaacaggcgcctacagaaattctgaagtttaacataatttagaaagttgagatgcaaaagcatgcttcttaatgatcttcctgccatcctgtctttaaaaatttattcagtcaaggagcatgttcagggggcatgtatgcttccagatttcagcaccagagaaagtgcaaagaatagcttcacccattctctgtcctccaggaacctagttctggtatttagggccagtcagtgcccttggtgatatggcaatgggctgctcaccaggctgagaggttctgaaatcttggaagaggtgtattgtttgttgttgcaacaaatagcttgaggaaaactaaaaatggctaaaagagtacagaatgatgtggatgatgtttttattcagggtggtctgggaaggcctctctggggagatgacatctgagcagagtgagtccatagggtcttacaatccatttcattcttcattcttgattagttgtgtaaatatatctggtataaggtccctgaattccttcaaggaggctcagacctcctccctacccccaaatactaaaagagaccagttttttctcaaagcccaaaagaaataaatttcaaatactgctcaaaagaaactttagcccctgttaagtctgtcagttgccttatgctaagtttatagtcagggtcctctcctacgagtaggtgatgaaaaggggttggaaattcacccaagggaataagtacagaggaatggtaagaattgactctggaatgagagagcaacctcctagtgttcccactgaaataaggtggctactactactaacaactcacacttgttgagtatttacgtgtcgctgagtatttgcctgtgcctggtactgggcttgacctttccattctttagcctggcacatccctccccaacaattttagagaagtagagaggtaggctatcagctgagcagagcccagtggggtttagaaggcagagatggtgaaaatgggccgctggactgtaagcttcatgaggatagggactgtatttttttttcctcaggatttagcacagtgcaaggctattatcaatgtgcaataaatatttgttgaatgaatgaatggatgaatgaatgagtagtactagcgaaagcacagaggcaggagactaggcatgtgtagaattccatgtgtctggagtctggagtctgatctctcttccctgctggggatatcagagtagatgaagcttggagtctgaggtgagtgagaaagtgtgtggggtaaagttggaaaggtagattgggacctggagtggagacaatgttatgaggacacagtttctgtttcctggagacataagaagactgtatttcccagcttcccttggggttagactggtgccatgtgacaattctgaccaatggcctgagtggaggtgacttctgggctgaggcagttaagagcacacaggccacctccacttctctgttctcctgttgtggtgaccatgaaggtcacctaccatgatggcagagccacaggggtagcagcctggatctctgagtcactgcttggaagatggctacttaactagcactagacttttagtgagggacaaatatatctttgttacgttaagccactgagattttggggtttatatgttactgtagtatatcttattctatcttgactaatgcatgaccagatttctgggggccttaaatgccaggctaagggctttctgctcttagagagcaaaaagtgcaattgctgttgccagcagtcctcctacatactcatctagagtaggtccacatgtgtgggggaacctgagggcttatccctgctgttggggcaagtgattcaatgccaagagagcatgactctctacatgcactcaaaagatgagtaccaggtaagttctcgttgagaaaggccttctcttcttttcctctgacctgatggtctttgtggcagtccaagtatgttaggtgggcatcagaagtggtcctggcaagaaggcctgatcagaaagactaaaaatgaggtcaggctggttgtgaaatttattttgggatgttcaaagtggctcagactgcagagtctgcgtgattgctgatagagaggcatctcttttgtgttaagacactgaggatggagaaaagcagtggtttcaatttaatctccaaatagtgtttttttttttttttaaataaaagcatgtcacatgaaactactctgcaccttgatgtttttcactcagtgcctatcgcagaccacctttcccctcattctcttcaatgggtgcttattctctcagaataggcataccaccctttctgaagacattcccctattgagggacctttttatttttgtctctgattcctcaatattataaatgaggctacagtaaacactcttgtacacatcccctgaacacatgtccagtgtttctgtagtgagacatctgggttggaaggtatgagccctttttgtcttgataggtactgccaagttgctaccttaaagggctgtgatcatttatgctccagagattggtgattttgatagaataattctcctgaggaactcagcccctgcttcttggtcaaggatgagggagccacagaccctgtggaacacgtgtttgcctccactcctctcatttaatctgcagcacagattcttcacgggagtcccttcccatgggtgctccccctccacaaagctcacatttaagtcctgaaaaatgagaggacttaatccagtctctatcagatctaaatcagaacgtttttccccttttgccattttaaattacctcttagctcagccccagactgagtaattcagagttaatgggatatgaaagtcatggtccatggcatgattgtgggtacctagccagagggaagcaagatttattttcttggaacccaactgggttgaaaagggtgataaatcagcagggctattgctagctccccttctgctgcaagtttcattccagcttatcagaataatcatcttagttctgagacaggagataaacagccaaatccagagtcccactatgtggtaagagggagagatgtctttctgaagtctcttttcctaggtatctttggatgggggtagggaacatgttatcatcaaactgcagtccagtgaaaagcatcagtctgtatttgcccaaggcacaggcttggattttgtgtccatgaacacagctggtttgaggtttctggtctacttggggatgctgtgtaaaaggtccttggaattgcatgctgattcactgtgtcctgtgaactgattgcagggacacacttctccatgacttggccatttctctctccgttattctggctcttggttcctctttggttgttctgcaggggtctagcaatcattcccacagagaacactatactggttttgtggtcattctctaggtgttcccttgactttgtgaccaatcccactggtgacagtattataatgtggggctcatggagcaaaagtcacagatatatatgcctgtggaatcctaaggggccacagcttacacaagtacacacagaatcaccttaaatagtaacctgaggctgggagtggtggctcgtgcctgtaatcccagcactttgggaggccgaggtgcatggattgcttgaggtcaggagttcgagaccagcctggccaacatggtgaaaccctgtctactcaaaaaaatacaaaaattagctgggtgtggtggtggatgactgtaatcccagctactcaggaggctgaagcatgagaatctcttcaacctgggaggcagatgttgcagctagccgagatagcgctactgcactccagcctgggctacaaagtgaaactgtcttaccaaaaaaaaaaaaaaaaaaaaatagtaacctgaaatgtcaaatgctagcagtggctgaattctcactttggcttatgctaagctgctttataagtattatctcattttatcccccaaactgttctgtgaagttgacgctactattgcactcattttacaagtgagggaagtgatgcctggagaggttatcaatggcttgttcgagatcacagaactagcaagggaccacagagcttatgttggctgcttccatgtacgtatttacacaaacgtccatttacacaaatacatatgcatgcagagatgcacatgcataaacattcagattaaaacatgtgtgtgcacacacacagacactcactcaaggagaatgttcagcaaagaactagtgattgagtcttgtgattgttaattagaacaaaagcctggattcctagctttcttctccttgaagcttcctcactttgtttactgtagaaacgtaaatagaaaaaaagacattggcaggcccgtttaaatttggggtgttgcctaggaaaggctggagggctacgttctgtgagcccagtcaaaataaagtttggtttgggccctggactttggactgcagagttggatgcttatttatttctgcatcaggaacaggctcatcccttgggcagattcatattaactgaggttaagatactgagctatgatcctgctgtacaaactcatcctcctaggagttttttctggaactagattcacatgggaatgtactggaaatgtctagcctcaaaccagggtagatggtgctatgatgtttaagggcacaggctgaaatatgtccatcttatagtggggcttgtctagccagtgggactggacatcctcacaacctactgaccactggctcttctgtggacaggcctgaaacaggcccagccaacccctgcttctgggaaaacttggtcagtgcttctgcagttgaccaaccctcttccactccatacctgcttctttagagatcttaataatacatctgatcagattatagccttggccctcagatctaggatgcatatccttctattcacctgcctctgctcagtttttttgattcagttcttgctaatcttaaaaatttatttcatacatggagatcttattctcctactttccaagtcctgagggatgctatgctttgttctagtcctcaagtactgaacacattcattgcagaagatgctgttgacgccctacacatatcctatcagccagtcctggaggtcacctgcagacagtccccatgtacaccaaaggcttccagctatttctcggccttaaggtgttctttggtccagggaatatgttcagcactcaaacagggcagcatggaagtgctgggaagtttgttctccaggaacagccatcaaacaataagggcatgaagatctcagccttcttgttcttcagtggggcagcggcaaggtgtgctccataatctctcagaggcccccagtgggaatgagccccagttgaccacagtggcaacctgcctccttcattggctcccttcccctccctgtctcacttccctactccctcctagtacttcctaaaatcacctctcaaataaactacttgcatccttgtctcaggctctgcttttaaggaaacccagacaaaacagctaccttcagtctttacccaagaaccgtttccatcaattccttgttcaccacatggcccagcctcaccttcctcttatctgagccccttttgataactttgggaagcactcaatcccagagggaagagcacaagcattgaagccagacagatgtggggctgaatcttggataggtcacttattgactgtgcgaccttaagcaaattactcaatctcattaatcttttaaacaatgcagctagtgatacataactttcgaagttgtttggaagaatcaatatgataatgtatgcaaagggctcaaatgcagtgcttggcaattagtaggtgttcaataatgtcaggccttcatctctctctgaacagaggctggtttctttcagccgtggtgcaagcagatcatactcctcactgaaggcagcttggacacagtatagggcatggctgagctctgagtacgggtttgaacagtccaggaatgggactggtgatatggtagccaccttcttctccccatattggcagaccctacctctctcttctttttgactcctatgcttaaggccactcaacatttcccaaagaagctctaccctttcccagctctgctcttttgcttacctagttccgtctacctggaagtcttttatctttcccaacctcatcctctgaaattccactcaatctttcatagtgtggtataaatcaagatgcataccagattcaccaggagagctttttcaaaacatacaccttaaacttaccctcaaaacttccgattcagtagatctgtgttgaggtacaggcatgtatgttttgaaaaactttatttacgctgattcatgcccttggggaagaaatactcatatcatccagggagctcaagtgatgtagtcaaacttgactccctgtgtgccatctacttagctactctggagccccagttttctcatctgtaaaatggggataatatctatcccatatggttgttataaagattaaatgagataatagaagtggtgctcaggaaaaattagatctacattaaaccatttttgatcccccagccagaagcagtcacacactcccactttcctatcttgctatgtctctcctgtagcactgagtgcagtggtccttccattgggatcatcagtgtgagttgctcctcacccccagcccctaacttgaacatgcctgctgagggatggggacaaacagggacagtgtgttatctgtcatgtgctcccacagctctggcatagtgtctcgcatggaatctttgctcaataaatttttgctgaattgaatataaaaccataagaaactaatgtaagtggttatgttaggtacctgcataatgcgttttgaacaggcttttgattagtcttagtgtccgggaaacagtttcctactgacagtgcattggaaattgccaggagggcaatatatgtgtgcataaaattctgcttttctcagacctggacagaacctttgtttcctggggcttctggttgccaggcactcacaggggctgaggtgagcaaatcatagggctacccctggcctgcatcctcgctctggacctgttgaggaccctcctggctccattcataaccccaagacttcgaacttggctctttagagagcacgagggttgagagtcctgttttctcctctggatttgaagcccacgagtcccctgtttgtgtctcatgacctggcttcagtctccatggagagcccttcccctggctcagagtcacagctgttgctgcaggctgaggctcctgtggtgctttaatgaactcctgagactctctgggctgctgtttcccaggggagccaggctgctagtagagctggaggctgggctgcaagggcaccttccctctaagaacacagatgtatcactaaacggtcctttaggggaggggtctgggaccacatggcagcccacccagggatctttctaggagatgagtatagttgcagagctgaggatgtgttctggccaagggggaaatgaactgtatgggtacacttccaacctccaactgtcttttatttctcgtctcttctttttgataaacatacaatatctattaactgacaagggtaggagggaaggcagaaacctaatgaagatgatgggttgatgggtgcagcaaacccccatggcacatgtatagctatgtaacaaacctatacgttctgcacatgtatcccagaacttaaagtatagtaattaaaaaaaatagaaaaaacaagaaagaaaagtaattttctatagtttcacaacccaaagttaaccactattgacattttgatgtaggtatccatgcatgtaggtattcacacatgcacacatatgtactatacaagagcatgtacataatatacatatgcatatatacacataggtacatatgcatgatatatgtataatgtataggtgtatatatatcacacatacaatatacattggtatataaaatatagattataaataatatacactataaatagtatatttgtaatgtaaataggcaatattacacatgagtatatataacacatataatttacagatatctgtgtatactattcataaggatataatatacacttaagtatgtatgtataatatacaatatatagatatgtatcatacacatctaagtatgtaagtataataagcattaagtagattatatatctatgtactacataggcatatataatatatagacatatttataacataggtatacatataaataccaatagtctacataatacaggtagacatataaatctaatgtatagatatatatgtgtaaaatattatatatggatatacacatagccatatgtatatataatatagttaagtatatatgtgcataatatataaatgtttatataatatacataagtatgcatgtataatacatgcagatgtatttatatgcctaagtatatatgctatacatatatatagtatacatattttatatggaatcatattgatttctgagcagccattcttttctctccagcaaagccagagaggtgttatgaaaattccagactgatcacatactttcttaaatttatacatcacctttccctattgtattttcgataaagaccaaaatccttaacttcttctgtgaaggtctgtttttctgaccctcctgtacatactcacttcttccgcagcctcagagaacactgtccaaccatttgatccctcggtttgcacccctcattctcccccactgtgcctggacaacccttattcatctttactcaggaattcttcatctgaaattgagtcctctgtcaggcatccctcagcagcctgcatttttttctatcagaatattcaggccttttaaaaaatatctctcccctgccggacagtgagcctcaagggactctgggggtcctgaccagtttccaactgccatcagtgtcaggctgtcggagagccctttataaatacttgctaagtagcagatgacaattctgttcttttaaaaattcactttcgagcatattgtgagcattttccatgtcaagaactgtattagctagctacattatcatttttagtgacatcacatattccatggtatggatgtaccataattaatttaattgatttcctattgctagactaaggttgcttctaaatgtattgttgaaaacagtgttgtcattgacattcgtgtgaaacatgtaactaatttgcctgaccaaaaaggttgcaccaacttatatgtattttcatcagcgaagctgtcttttttttttaacacacccatctctacactattattattattgtcaatttaacagtcatagttcaaagttgcctttctctgataactaggaatatttgttcattcattctacactacagatacttattgagagctcactccatattactagcaaaatgaacgtattctatggccagtagcacattgttgcagaacaataatttaaaatacagtagggaaaacctcctctctctctctttctttttttttttttctgtaaaacaccttcttggttactattatgtgtttattcttctcgataagcattacagttattttgtcaaataccttttaaaaaaactctttagtgactctgatttgaagtgcatgaaatttatagatttaaaaagaaataaatcttcaccatattgagtcctcccacccaaaagcacaacatgagtttcctttaatgtttctaaagtatttcttaaaacaatctctcaaatctgactactcaaaataaacaatattaacatttggctaaaacatcttattagatttttgaaggcatatgtattgacataaatatataattttgcctcagtgagatgcccgtgctgtttttatcaacttacatagaaattgtgtatatttaaggcatgccacatgatgatttgatacatgtatacattgcaaaatgattaccacaatcaatcagttaccatcacctcacatagttaccatttttttgtgtgtgtgtggtaagaatacttcagatccactctattattttttgcttttatttttatgttttgagactgagtcttgctctgtcacccagtctggagtgcagtggcacgatcctggctcactgcaacctccacctcccaaattaaagagattctcctacctcagcctctcatgtagctgggattacaggcatgtgccaccacacccagctaatttttatatttttagtagagacggggtttcgccatgttggtcaggctggtcccaaactcctgacctcaagtgatccgcctgcctcggcctcccaaagtgctgggattacaggcgtgagccaccgtgcccagcctagtgtagcattattaagtatagtcaccatgctgtacatttcattccctaggacttatttatcttttttttttctttttttcacacagggtcttgctctctcacccacccaggctggagtgtagtggcgggatcatagctcactgcagcctcgacctcctgggctcaagtgatcttcccacctcagcctcctgagtagctgggactataggtgtgccactgtccctggctaatttactttttgtggagatggggtcttgctatgctgctcaggctggccttgaacttctgacttcaagtgattctcccaccttagcatctcaaagtgctgggattacaggtatgagccatcacacctggtccttattcaccttgtaactgacggtttgtaccctttggccaatatctccctattttccccacaccctagcccctggcaaacactattctactctctgcttctatgcgtttgactttttcaaattccatatatacataagatcacatagtatttgtctttctctgtctggcttattttacttagcataatgtcctctgtgttcattcaaggatgctttaaaaaaactttaaggttaaacattatgatctgtaatacatatttttattgctacataataattgtacatatatatggggtgcatgtgatattttgatacatacatataatgtgtaattatcaaattggggtttttaggataccatctcaaacacttatttcttcatattggaaacatttcaagtctagctattttgaaatatacaataaattgggtaaaaaaataaataaataaataaattaggtgactatagttaagaataatttattctgactgtcctatcaaacactagaatgtgttccttctatctaactgtatgtttatacccattaaccaacctctcctcatccccccagtttcttcccagcctcttgtaatcatcattctactctctccctccgtgagatcaacttttttagttcccagataggagtgagaacatgtagtatttatctttctgtgcctagattgtttcactttgtctggttatctttttagaataaattccttgatttggaaagtttaggtcatgcatgtatttttagagatattacaaagctagacctcagaaaggttgtatcaaattgtcttccacctgcagcgtttaaaaatgttcatataaatctgtaaaagaaattaggaaaacaatgacatttacaatagcatctagaattataatgaggtaacactttacacccactgggatggctataattttaaaacaaaagatggaaaataataaatgttgttgaggatgtggacaaattagaacctttgtactttgatagtgggaatataaaatgactcagtcactgtagaaaacagtttggtggctccttgaaaagttaaacataggtttattatatgaccccacaatttcagtcccagatgtgtactcaaaagaattgaaaacaggtatcatacaagtacttgtacacaaatgttaatagcaggactatttgcaataccaagaggtggaaagagccttaatgtccatcaagagatgaacaaataaacaaattgtagcatatccatacaatggaatattactcagccataataggaataaaaaaatgatacatattacagtgtggatgaacctccaaaacattactctaaggtcaaagaaaccagacacaaagatcatgtattgtatgattccatttttacgaaatacccagaatagacaagtccatagagacacaaagcaattggtgatttctagggacagaaggggaatgtggaaatggagagtgactgctcagtgggtatgggatttgattttggagtgacagaaatgttttggaactagatagaggtggtggttgcacaacattgtaaatgtactaaatgccactaaattgttcactttaaaatggctaattttatgttatgtgaattttacctcaataaattattaaaaccaaccaacaaaccaaccaacaaacaaacagaaaatgcagtctgttagatgccatcagtcataaaagggaacctcattgactggaaatgtcttacccctgtgctctccactggaagaggagtagcaatatgacccaacaaagaaccagaaaaatcggcagcccagcaggggtaactttgcgccagaaaactagtgcccacatgccatacctctagcttgctgttttctgctataaagttattatgtgtttacctttgggaaaaagtaatgctcatgtgtcctgtgtctttgctcatggtaaatgtctcaaatctttatcagtctgagaagtgaataaaggccatttttatttgcatttctttcattactgtggagggtgaagatcttttcatgaagggtgaagatcaaacacacaatgccatgtgcattgtgtgtttgaattgcctgttgattttattcttatagatttaattttagatacggagtttacctccaggaatcccctgtctcttcccactcccacagagtgccatgtgcctgggttgtggaagcttctttcaaaaaagtttttgtgtttactggggccctcgggacttcaccaacctgggatgacctcctataataatttattagtgttgaaatctctcatcacacaaatatataagcctcgactctacactctacactgcatggtataggctttgggcttcgacttcttagggaaactttctgctttcagccacgtccctgtgcaggtgcaagcttctttgcagtttccagaacagtgggcagagttgttctagccctttccatggaggggatttttttagggtcctgattttacagcggtctcagttccattactttgctaactgggacctaaggccacatgtcctatcccaaagttggcattaaaatcccagtccctaaccattggggccatgcacccacctcctgggggggagatgtcatggttcaaacactttccattctggctttgagttttcttttcatttattttcactctagagattttcctgtctttcgagtgaacctatatattttaaatattaattattttaattcccacactcttgtgggttttcggtggtagacagggacctctgtcacggatcagtctaccaatgttgctaaaagtctaatttacaaaaattgtttttgtagtgagactattaaccctttataatatatattaccaatactttttgccaggttttaattttttttttggctttatacatggtgttcattgtcatgaagaggttttaaatttttatgtagctatgtttctctacttttccatgcattgtctctggtattatgtttagaagacatcttctttcctaagagttaaaaaaaaaagcatttagtcttgttttcttctagtgcttttatttatttatttatttttaacattaagctttctgatctatttggagttggttttgctgtgctgtggaggcagggactcagcattaatctccctcactttctggctagttgtcatgacactatttattgagaagcccattgttttcctattttcatgtgtacttaggtttgtttctgaactctaatctttcactacatcagcaatggactgttttaattacaacacgttgacattctagtatatccaatttctcctcttccctgcctctttgtcttgcccccacccccgcttatttttttaaaagaaaaaatttggtctattcttatgtatctcccctcaatcaaatccaaaatcatttaaatcaaaatccatgtcaatatcattgaggtttcttactttaacaaatgtatagattgatagagacaatccctcttgttttctgataatttattgtttgctcataggaaatctgttgggtttggcaaaaatggggatatggaccctagtgaggaggcacagacattctgagcatggcattactttaagacaagcttcagttgcaaagagtgacgttggatccctgctttcaagcttccttcaaacccatccttttacccaggcctagcccctgactggtctcttcctgtgactgaaccaatgattttaccactgtctaccaaatcagccaaaccaggcatctgggtggtgggggacagcattcatgcctctctttcctgattgttcatggatccctgtggattcaacctcctgagcagctctccagttgtcctttcctctccatgcccactgcctctgctgtgattctggtctcagccttctttgtatgggatttaccgcagcctcctcactggacttcctgcctgcagcccaccttccaggaggacacagaattatgcatgttctgaagcataaatatatgttctttcccagcttaaatcctttccatggccccttcatgaagctgacagtgtagtaggtggagacatttatttatcctttcaatgaatatttattaagcagttacttacgataggacctaatctaggccctggggatattgctgtgtataaagatacaggaatctctgcccaaggccggatgttgggtgggagaagacagaaaataaacaagagaaataatatttaaagtagcttggttgggaatagataccaagaagaaaatatgtcagggaaaggggctaaggaattccagaggtagagagggtaggggctttttaaatggggtagccagaaaaggtctacctcagaggtaatgttggaatataactgaaaggtaaggggaaagtcacggatagcggtgttcttgttcagggccttgtggaccactgtgaaggccagctttactggagtgaccggggaagccagcagagagtctgagccaaaggaggacctaatttgacttcatgatctcgcttaggttttaacaggaacactatgatggagcatagaatatagatgagtatacaagtgactgaatacttgcaaatgtgacaagagctaggaaggagagttcagggtgctttgggagtgcagaacaggagaccctgattcagtctggaatgggtaggtgggagctcaagtacagctcaggcagcatgtgggctttagggcaaaggggagtcattaaagggatttgagtaagggcaggagatcagccatgcctgtgagtagacaggatgcttatcacaccccctgacaggttatgctttgggaggtttccttgggtgagggagcctgatgcactcatctggttgtggggtggaggactgcaggggcctggagagggctcactgtgcttgtccaggctcatgggaggcaggctggcaagccaatcaatgcaatcaagagtgaaactatggttggtttgggcctctaagttttggggtaaaatttcacacattgataataactggaacccctccccactcttttcatggcttctgtgtggtggaatatacttcctcacccctttgactttgaatttggccatgcgatcgatttcagctgttgggatgtgattggatgccatgtgccctagatccaacccaaagctggaaatgtgctcagatgatttggccagccctcttgctcttctgggactagccatggaactggctgtcccaataactgctttccttaatcctaaaatgagggacacatggaaatgacgtgaatttaacctgcagcctgaagcagagctgcctcagcacatacaggcctgtgagtgagaggtaaatgcttgtcgtggtaaaccactgaggttttggagttgtttgttatctggcaccatcacagcaatagctcactaagataaagtagttgggtaacactattattttcattttccagatggtgaaaatgaagcatagaaaagttaaattaactgttcagatcatagctagtaagggacagtctgcttggaactcaggaaatcacttataaccattatctccagaaaagcacatgcacaaatacatctctcacaggcctaagtgtgtttccagcaatgctgctcagtccctggcctataaatctggagaaactttagttcctggaagagccaagaccactacaagaaataaataaccaatgaaaacctgttttctagtgtctaaagcatcaaccttgaaacctcagctgattttagatattatcctccaaggtgcgcagaagagagacaggtgttggcagtgtagaaaaaccatgttgcggctcaaatacacaaggaaaccaggcagtgccctgcttcactctctctgtcttggcctcagaggtggggcatctttgaagcgtaatgaatttatgcacatttttgtgcatttaattgggggaaaatatttttaaatgtctatcactgtgttgacatcgtgtgtctgtgtatgcgtgtgggtgtgtgttgaaacaacatcattggaagatagtgtgggctaaagaggctgggctttggagctagacatcctggatttaaatgaaaacccccttgtgtgaccctgaataagtctgacaattcctctgagtcttggatcctttatcctataaatgggaggccgtaatacttgagtaaggaatgggattggctgccacaaagtcaagtatataaagcacctaccaccttgtagggctccaagaacatttgcagcctttccctgtcttgtcatctcttataaacagtgactaccaattgaagattgtccaacttgaggacttctgtgaattctgctggcatctggaagctgcttccacccagcggacgaagcaggagagagagctcatttgtcagtcaggacatggatcctgcagttctgcatcttcaagtctacaaccctctgtctcagcactaaaaagcatttaagcacaatagagcttaaactaggagatatttgaagctgggttgaactcctatctttattatttattagctttgtgacttgggtaattaaactttctatgccttatttattttcctttctataaaattggcataatatttgtatcctgtttaccaacatattatcagcacttagcatggtgcctgccacccagtgtcatgagaatcaagtgaaatgatgcataaataattatctagcatatagtaggcacttagttaacactggtttctgtagtgatactgttggcataaaggcaaagctttttaagacagggagctcaagaaatattaactgaatctgagtggtcactgcattagtacactgttaaatcctttttagagttccctgattacattttgagaaagctcagggtctagactctataaattggaatttgcagagctgggctctgtttgccttaagaggcatgactagcttctcttcttggcacttcttattctgcatacctgccatgcttccttcaacccaatggcatttgcatatgctgtgagtgcaaaagtccatcattattatcatcaccatcattgcaatcattatcaatatcattacaattaacactatagttctcataatgaccaccatcaatatcatgatcatcaccataatcaccactacttctatcatcatcaccagtagcattgttgtaatcatcatcactactaccacagtaactattgctggcactcccaccacttactgagcccttacattgtactatactagctgatgaaatactttgtcttatgaaatctttataagaaatctcttaaggtaagtacagttagtgtctccattttgcagacaatgcaaccaaggcacgtgagtgtgaaataattagcccaaaattaaccattggtggagacataattcaaacccaggtcatatcactcctaggctagctctcttaactaataaatgaaatggcttctcctcactccttatgtagttaactcacccgtcaaatctcagcttaaatgtcccatccttggaagtcttccataactgccttcatcaccgttgtaagcacacagaattccctttaagttttcttcatagtgcttatcacaatgtgtaattttagatttattttcacaattatttgattgatagctttctcctcaagttgcatgtgggtaggaatgacagaaactgggtttctgttgtgtgccttcttgtgccgtgcccacagcaaggagactggctcagagtcagtagtctaaatattgttgaatgaatgcatgagccctgcctttatcactagtctagctatgtcctgctttgcacttctctggtctttgcaagtcaactttatttctaacttctgttttggtatgccctctgggttcttactagagcaagtgtcattctccttgggtcactattagctagatagactctgaaaatggcttagaaacagggggtcattgagaatgaataggttggagtaaggagaaccaggaggcagggagactaggctgttgtaataataaaggcttggcaaagaggccatggatggatgaccctcagtgacagtggtggtattagggatcagagttatagacaaagctaaaaaatggtatagggcagaaatggtgggacctggtatctggatgaggggagcagatggatgtgggctgccatcagcagtgttaagatttcaacttcagaggaagaataaagcatggtgccattgaaatctgtagccttgatggccatcccagccttatctccctgcatgtgatgggcccttctacatgtctgtggatttgcatatgttgttttctttgtgttgttctgtcctttctctcctttctctctctggaaaactcctactggcccttgatgacccagctcaacggacttctctgtcctttccagtggaggttattgctggctctgggctgccaacaaattttggtcagatcttttctataccatgtgccatgttgggatgccatcaccccaacatgtctgtgtgcccatttgccccatcagctatgagatttttaggagcaggctttgcaatgtctttctttctcccttcttcctccccttcagcctggacctctctgttcctctcctccctgcttaccttcctttccctccagtatgtatttaactcctgtaatgccataaggtggcaagtgctctattaatgaccagaaccacaatgaagagagactaaaggatcggggatcaggggtggtgggctctggcttggctgatggtatccttagctgagatcaggaagagaaatatgtagtctttaagagagcaaacaaccctttttgtttgtgattaggtgagaccttcagcctggatcttttgacatgaaccatttgatttcctgacacactgtgtttcgcagtgtctgagtttgggttcagaccattgcatccctcttatggggtgagcagacaagaaagtgagtttagcaataaagcccctctgccatgtgttttttttcaccttaactatgttatttatagccaaggtgagaccagtagcgagtggtgtggcactggcctcacactctcccctctgctggttcctgactgggaaatctctgaagagctgggtgctaaaccctctcattcagtgacatcatcattcttttgctacagcccatttagattcctggcattgagtctaggatggaagttaaggtcctgcacagagtctggaaaatgctgccagttacccccaatttcagccgttcgctctttggccttcttgcctcttgggagctagtgttgggaccctgggacctaatcgctgactacccagcaattttctttccttctggttcttatctgttctcagacaaatctcttaatctctgttcctcagttccttcatctgtaaaatggggattgtgataatataatacctacctcacaggattgtagtgaaaataaaatgatatgctatatgtaaattacttagaatcctaccatcacataaataggagctacataagtgttagtaattactgctattactctactgtcattattgctgttgccattataattttttacactgagtgttgacattgttcttccaatcaactagatatggacaagcttaacacctttttattcaagtctcacaccaatggcatgttgttaggaggtcttacctgactcccaaacctgtaaccccaccctgtaactctcaaaactctctatcatattatgacatgtcattgtctttatagcatctatcactgtgtcacattctttgagtacttatttattgcctctctctttatcctagaaggtgagcttcattgccttctcctaggttctcagcacaacaccctgcacctggacaggtctcaataattaatattacttgttaaatgtcttcatcctacacctttttccttgtcctggacttctgtgagtttcgttccaacaactgagtcccaaaggagggagaaattgagactgggtggaattgcggagttttgatgttcactgcattgcttcctttccaccccttggtggagccgttgttgcacctttctactgcatccaggcattctactctagactggactggaaatacatcatactaaagtgtgaatgattgatacagacttaaactactaccttctcttaagagaccaaagcctgattaattccgctttccttccttataaggaaagatgtggggatggtgcaaaagtaagaagatgaagaagctgattctaattctaattaattgcatagtcctagacaagccatttaaacctctctgagccccagtaacacacttgaaatgagttgctttccatgtgagttgtcatgtgtgtcaaatgcaatccctgtgtctgaaaatggcttgtctcacaaaatgctcaccgaataagctgttatcactgtttatcataacagaaaataaggagagtaactgaagtgagtgacaagttgaatatgagccagcaatgtgcctcaggggactccctgtctctctctctttaaatttaccactcaaatccttgggctgcctgagatgaggcctcagggcacctgctttcccccatgtcttcttctgcccccgtgccctcactcttagtgtggcttggacaaagaactccaggtcctgcccatttggagagacaaatgatgctaagatgagctgtgtaaagtctcaatatcaagtcatcttttagttccaaggcctctttctagctactggagtccatccagcctttctcttagcagcatcatttccttccagagtctctgataaggctttttctatgtcttccccctgcttccctggccctagcttagctaccctggtctgagctcctgcccctattaaccagcacctttcgtatgtcaagctgggtgccatccctaggcctacccctttccctcccaatgactaaagcttcttccattcatgagcatccactgagcttgtggaaggggcacagaacagactaggaacgtgtgtgatcaggccacatcctctatggcaaaggccttattttgtgtagttaggggagtatgtgctggagcctgattgcctgggttcccatcctggctccagtgcctactagctttgtgaatttaagcaatttatttcatcttcttgtgcctcagtttattcatctccaaaataaagacagtcattgaatccatatcaaatggtttatatgaggattaagatggatttattcatgtaaaacatctagaatgaggtctagcagacagtaagtacacagcgaatgttggcttttaaaaattattaataaagagtcactgcttccttattggcaaaccttagtcaaaggtgacctcaaatctgaggtgggtgcccagggaaaggtttctttatccctggaccatgcctctactccttaggatgtttccaagagaggtgtctgcatgaggaatggctgttcttatttcttcaccccttcatgtttccatttattttgccaggcacctttgcaattgttccattaaaggtagatgcaggtccctgccctttgagttggaacttagctgtgtgaattgtttttgcacaaaggagtgtgggcagaagcaaccatgtgccagtttaagcctaaggctgtaaggtgtcttcggtgtttttgcttgccctcttgtccttctgccttcatcatgaaaaggacatgccttggctaggcagctggtctgaggaagatgacagaccttgaagacaatggagcagactgctccagaccttcagcctagagctgctcattcatgcccacctaggcccagccaagatcggcagaatccccagcccacaggaacatgagcagaataaatgcttattcttatactctactgagatttttggttggttgttaggcaacagtagctgacagatgtacaaggtgagtggcacagaattgccattgctacagtttggatgtttgttcctccaaatctcatgttgaaattctatccccagtgttggaggtagggcctagtaggaggtgtttgagccatggggggcacacccctcatgaatagattaatttcctctttgggtggtgggtggtagtgagtgaattcttgctctattagttcctgtgagagctggctgtttaaaagagcctgacacttcctctttctctctcttgcttcctctcttgtcatgtgatctctgcacatacctgctcctcttcaccttccatcatgagtagaagcagcctgaggctttcacaagatgcccagtctttcagccagcagaatcatgaaccgaataaaccttttttcttaacaaattaaccagtctcagatattcctttgtagcaatgcaaaatggactaagacagccatgttattattgactaggcttgggtccccaaacctaaagcaaggaatggttggtgaactgggttgaaccgtgtagaatatccctttccctaaactagttaaattacattgaagtaggtcatcactgctgtccttattggcaatcgttttttagtctccacccatcttgttttatgcccaaaactaagccttacatctctttgcatgagggttgcatgcaggaaagaggcagaagagaccagtagactggcagacatgacaagttctgaccaattaagccctgcctagcagagcaccttgttgcccaagacacacaaatggaagagagaggaggcaaggctagttgagtgttgctctgggagactgtgccttgagtcacttgctattcctgctgcttggatagaagagagaaaagagaggaaaaaatacccatattaaagtaaggtaactcctccattagagggttagacccaatcagtgtcttggtgtgcagcctatatattgcaatattatggtccccttccctggaggagaagctaagtcagggaggagaaggaggaagtctggcatcttctacctttactctccctcctcatcaatctctttcctcataacctactttatgtatttgtatagtacttgtctttacctggagtcatacacttactagtttatttgattatatgcatctcccattgctagaatataagttccatgagggcgagaatccagttggttttgttcatggctatataccagttgcctaaaatagctggtacagtgtaggggattgatacatatttgctgaatgaatgcatgaactcctggagtggtccatgctggaacatatcagcttggtcactgtttgctcattgcattcacggtctcctagcatttccatgcccatggttgcaggaactaggaggccctttctttggcctcctgtaccttgggtgtttgctccagtccttgacacacatgcctgtggtctggaacctgctctgcatctgtacccctacactccaccttgttaggtgtcatccctggaccactcatataggtgatgtggtttggacccagctccctcctggccccactccacttttggttctgctgactagaaggctaattctgagtgcagcaactctgttcccagtgaagctccaggacacggtcctccagagaagtgtcccccacctaccttgcttgcctggtggggatattgacaacctattaccttatagcaggaccacggataaaccaattgcagagacaccttagtctttgtgacattttttctttcagtttggcctcctaaaagtcttaccaacttatttttattgttttagctgattctgttcctctttgctcctgcagtgattcacccaaatgcagcaacttttatgccaatggactctactaataccgtttgcaaagatgcctccgtgaaatgctcgggaacactttctctcactgctctgggaagggtttcttggccccagggtgcaaaacacaaccgagaaattttcaggtgaagtgttggctgaattctatggctgctgcttgtggtcgatcaacattcctcactcacagctgttgagcgaggctggggatgcattctttgctgtttggctgctccaagttcacatacatttttgacataaacctagtaattgctgactttaacttactattctcagcctctggcttctttctgatttatggctggagccttggggtccttcgtcagaggctccttatacttgcccattagcacttctctttatatttggcaagggtcactggtacattcctctacaggcatttatcagaagctcatgaacattacagacaactctctttctagctcatagtctgaagctcaacagatatttgtggggagaatcacaataattataattgctactaatttttgagctcttggtgtgtggcaggtactatgttattcattctttatagcaatctattaaaagaggcactgtccttatacccattttactgatgaggaaactgaggaagggagaggttcaataacttgttcccatatcagacaactggtgagaggtggagccaggatttgaatctagatcaaaaccactgcttatagccaatatgattttggaaggtaggaaggcagcaaggatggtaggaggagcaaggagcagctatcatgtgcttggtctgtgaactgagtgaagtcataaccacagagtgtgagccttgagcccttgaaaggagaatcttggcatgaagatctcatcccaggaggctctccgcaacagactgggttctgaaatccacctcccattaccgctcgcattggtctgactctggatctctacagctttttgcctctccatgaaggtgggagggtgaatttcttctgtttgctcctctggatccactctctacccttttgcacccagctctgtgccagggaggctgactgtatggagcactcatgggctcccttccttctggtttccagatgggttcagctggttggcaccagaagcagatctaagagaaggggaggagtgatgtagggatccttgctcccctgcctgcctccctgtgtctccacaggatctaggctccaggtagctggccctctctgcatggcactccctctccagtttccagtaacttcctccccttgctccttataggctagagatatggtttggctgtgttcccacccaaatctcatcttgggttgtaataatccccatgtgtcaagggtgggtctgggtggagataattgaatcatgggggcagtttcccccatactgttctcatggtagtgaataagtctcataagatctgatggttttataaatgggagttcccctgcgtaagctctgttgcctgtcgccatgtaaggtgtgtgtttgcttctcctttgccttctgccatgattgtgaggcctccccagccatgtggaattgtgagtcaattaaagctcttttctttataaattacccagtctcaggtatgtctttattagcagtgtgagaacagactaatacagctagggtgggtaagagcattccctgttactgttcctgaagttctgcattattctttgtggttttcctacattctgcctataccttggtaaatggttttttttagtaaagttcccttaaattatccaatctgaaggtaacaccttgttattatcagcacccttactgatatccctgaactttagtttgagccatttccaaccttcagatgaacaacctttacctgcacccttgactactcccaccccaactattccgtattggtgctctttcctagctctcgcagaaccattgtactgtggaaataacacaggtttctggattagtgctgggttcaaagcctgcttctgacacgtactctatgagtttgggcaagttacttgattttcccatgcctcagatttctcatctgtgaaatggaggatagtatcacttcacaagtttatcatgaaaatcaaatggcataatggatataaacttttattagtttggtgcaaaagttattgcagcttttgccattaaaagtaatgccattaaaagcaattacttttgtaccaacataatagcttagtgtctggcagataaacatcggtttaaacatccctcattttgcccgtgctctcttgatctgtaattctccagaccacttatccattttgctaagcagttccccctgggtcctgccccaagatatggccaagggaacatggcagagaggaaggaagcaactcttggctccccatgaaaggaggaatgggaggaacttggaggacagcaaaaatgacagtccaagggtttgaaataatgacacaggagaagggtaaataattgcaaaatggaagtgtaaaaggggtgatttaatactcctcttcacatacagctccagtgtgccagttggaaatgctaaaaaggagtgtttctgatatcctagctagagcaagttccaatatactagtaatatacaagtccaatggccagatgtccatggctcctacagaaatggataaagaaagccccccttaccttaatcttgtgtttctttttttttttgagatggagtttcgctcttgttgcccagtctggagtgcagtggtgtgaccttggctcattgtaacctatgcctcctggattcaagcgattcttctgcctcagcctccagagtagctgggattacaggtgtgtgcctccacgcctggctaattttttatattttcagtagggatggggtttcaccatgttggccaggctggtcttgaactgacctcagctgatccacccactttggcctcccataatgctgagattacaggcataagccaccacaccaggaccctcttgcttttcactgtatcctaacaaagctctgtctccccagtgggaagatatctcttccccacttggagttaaaagggcctgggttgaaattgagctgcatattctccttgcttgttggatcttgggagggtcttgaccacttcagacatcatttccgccagatgtggtggcacgtgcctgtagtcccagctacttaggaggctgaggtgggaggattgcctgagcccaggagttccaggctgcagtgaactatgcccatgccactgtactctagctgggcaacagagcaagaccctatctctaaaaaaataacaaaacaaacagaaaaacacatcatttccctcatcctcaaaatggggatccttgtaactactcatgagcgtagctggaatgatggttgaatcaggagcagaggatgaatataaaagatatgaatataatatagagccagaaaagcattcaagcctcaaccaatgctgatttccacctttattttcctctcactgtagcagaacaggtgccctttttcatttcaggggaaatctgaacagttcctgtcttgtatttcttaaaacagctgaaaaaattccttgatttttttttacccttcttcagctttaggactaaatgcctctaaccctccttctctctcatcaggtagtacattttgtttgtttgtttattttttgagacggagtctcgctctgtcacccaggctggagtgcagtggcgtgatcttggctcactgcaacttccacctctcaggttcaagcgattctcctgcctcagccagccaagtagctgggattacaggcctgcgcttccacacccggctaatttttgtatatttagtagagatggggttttgccattctggccaggctggtctcgaattcctgacctcaggtgatctgcctgccttggcttcccaaagtgccgggattccaagcatgagccactgtgcccggcccattttttgttattgaattgtcacttttgaggatgctcttttacccttgccaccttgtccctactcagctgtgcactaagagtgaatgtctgggtaggggtggggatggagtccagagtacagttatcctgagtcacaggaactcctattttattttatgcctttccttttgcccttctagcttccatatgaacctattgtccttcaaaagagctttgattttgagacttagactttctgcttgatctgaggacagattggattttgggagttagtagtagagataatgaagacaaagaccacctgggaagactaagataaattttgatcggtaattgtattattcatcacctatgttcttaatttgcaaataaaaaaatggtcctattcatacctgagcattcatagttttcatgagtgaggcatattatgacttcatgggtctgatgtgttctttttgcaagcaggggtaaatggagacatttcaagcttgcctgctgcatattaggtgtgcctcagaaagagttcctctggtcagaaacctttcacagtctctcagcttcatgttctaattgttttagaattaagcttttaaagctcaaacatataattattacattccatttcaatcataatgactaaacctgctgatgtgattcttggccatcaggtctacctgttgatggcctgttagaatcacctgtgcagctttgaagaaatacagatgccagggcctcacttcctgggggctttgatccattcaatctatggcagggcctgggaatcagaatatttataaagtaccacaggggatgctgatacgtagccaggattgagaatcatggagctggaccacgcaggggtgaggtgggtgagttgctattgtcctacacttttattgctattcccaatgagatcatttttaaattattattattatactttaagttctggggtacatgtgcagaacgtacaggtttgttacataggtatacacgtgccatggtggtttgctgcacccatcaacccgtcatcgacattaggtaattctcctaatgctatccctcccctagccccccaccccctgacaggtcctggtgtgagatgttcccctccctgtgtccatgtgttctcattgttcaactcccacttatgagtgacaacatgcagtgtttggttttctgttcttgtgttagtttgctgagaatgatggtttccagcttcatgtccctgcaaaggacatgaactcatcctttttatggctgcataatattccatggtgtgtatatgccacattttctttatccagtctatcattgatgggcatttgggttggttccaagtctttgccattgtgaacagtcctgcaataaacgtatgtgtgcatatgtctttataatagaatgatttataatctttgggtatatacccagtaatgggattgctgggtcaaatggtatttctagttctagatccttgaggaattgccacactgtcttccacaatggctgaattaatttacactcccaccaacagtgtaaaagtgttcctatttctccacatcctctccagcatctgtttcttgactttttaatgactgccattctaactggcataagatgttatctcattgtggttttgatttgcatttctctaatgaccagtgatgatgagctttttttcacatgtttgttgggtgcataaatgtcttcttttgagaaatggctgtttatatccttcacccactttttgacggggttgtctttatcttgtaaatttgtctaagttctttgcagattctagatattagccctttgtcagatggatagattgcaaaattttctctcattcagtaggttgcctgttcactctgatgatagtttcttttgctgtgcagaagctctttagtttaattagatcccatttgtcaattttggcttttgttgccattgctttcagtgttttagtcatgaagtctttgcccatgcctatgtcctgaatggtattgcctaggttttcttctagggtttttatgattttaggtcttacatttaagtccttaatccatcttgagttaatttttgtataaggtgtaaggaaggggtccagtttcagttttctgcatatggctagccaattttcccatcaccatttattaaatagggaatattttccccatttcttgtttttgtcaggtttgtccaagatcagatgattgtagacgggtggtattatttctgaggcctctattctgttccattggtctatatatctgttgtgataccagtaccatgctgttttggttactgtagccttgtagtatagtttgaagtcaggtagcatgatgcctccagctttgttctttttgcttaggattgtcttggctatgcgggctctttttggttccgtatgaattttaaagtagttttttccaattctgtgaagaaagtcattggtagcttgatggggatagtattgaatctataaattactttgggcagtatggccattttcatgatattgattcttcctatccatgagcatggaatgtttttccgtgtgtttgtgccctctcttatttccttgagcagtggtttgtagctgtccctgaaaggtccttcacatcccttataagttgtattcctaggaattttattctctttgcagcaattgtgaatgggagttcactcatgatttggctctctgtctgttattggtgtataggaatgcttgtgacttttgcacattgattttgtatcctgagactttgctgaagttgcttatcagcttaaggagattttgggctgagacgacagggttttctaaatatacaatcatgtcatctgcaaacagacaatttaacttgctcttcttgctatttgaataacctttatttctttctcttgcctgactgacctggccagaatttccaatactatgttgaataggagtggcgagagaaggcatccttgtcttgtgctggttttcaaagggagtgcttccagtttttgcccattcagtatgatattggctgtgggtttgtcataaataactcttattattttgaaatacattctattgatacttagtttattgagagtttttagcacaaaggggtgttgaattttgtcaaaggtcttttctgcgtctattgagataatcatgtggtttttgtcattggttctgtttatgtgatggattacgtttattgacttgcgtaagttgaacctgccttacatcccagggatgaagctgactagatcatggtggataagctttctgatggactgccagattcggtttgccagtattttattgaggattttcacatcaatgttcctcagggatatttgcctgaaattttctttttttgttgtgtctctgccaggttttggtatcatgatgatgctggcctgataaaatgagttagggaggattccctctttttctattgtttggaatagtttcagaaagaatggtaccagcccctgtttgtacctctggtagaattcgactgtgaatccatctggtcctgggctttgtttttggttggtaggctcttaattactagctcaatttcagaacttgttattggtctattcagggattcaacttcttcctggtttagacttgggaaggtgtatgtgtccaggaatttatccatttcttctagattttctaatttatttgtgtagagttgtttatagtattctctgatggtagtttgtatttctgtgggatcagtggtgatatcccctttatcattttttattgcgtctatttgattcttctctctctttacactgtgagagtaaaaccgcctactcaagcctcagcaatggtggatgcccctacccccaccaagttccagtgttccagatcagcctcagactgttgtgctggcagcgagaatttcaagccagtggatcttagctcacagggctctgtggtgatgggaccccctgagccagaccactttgctccctggcttcaaccccctttccaggggagtgaatggttccgtcttgctgtctcgctggcattccaggtgccactggtgtgtgaaaaaaacctcctgcagctagctctgtgtctgcccaaatggccgcccagttttgtgcttgaaacccagggccctgatggcataggcaccagagggaatctcctggtctgcggattgcgaagaccatggggaaagcacagtatctgagccagagtgcatgcttcctcacgggacagtccctcacggcttcccttgggtagggcagggaattccccgacctcttgcccttctcaggtgaggcaacgccccaccctgctttggctcatcctctgtgggctgtacctactgtccaaccagtcccaatgagatgaactgggtacctcagttggagatggagaaatcacccaccttctgcgtcgatctcgctgagagctgcagaccagagctgttcgtattcgatcatcttaccagcaaattcaggaccatttttatttaacaagacaataaagaaaccatgctcaagctagcatttagccagaggcagagagtacccagcacatttagtgctggctgtttagaatacagaggacaatagacaactgattgaggtagtttctcgtgtcaaatcagtgtaatcttgagcaagttccttcccttccctgggcctctgcttcctgatcttcaaagcaggagagttggatgaaacactttctgtgtgtcttgcagtgttgacacttgtcattgctgtgactttactgtgaagacatctcattgtttagtggaggaagccaagtgccctcctgccaccccatggggaaacacagccaccagaaagaggagggagaggtggtgtctggggagatggaggagtctgactgcagagttagccctggggtgactataggattaacacgaggctctccagtaagggctcattaccccttgatgaaactcaaatgtcatcatgggcactctgttcttacaggatggtagctcttggaatctcagaagttggtagagtggatatctggctttggaaggagaaggtcctttctccttaggggagacagccatgcacatgatccgtagaacacggagggtccagagatctgagaactaaagtttatgctttgcaaactgtaacagtgtgataaatatgaattattatcaacatgattcttgctattattaaatcctcacactgcaatgttaactggttcatgtttcagccccagctcagccactagttggctgtgtgatctcagacaagccaagctccatctctgagatatagctgcttcatttgcaaagtaagaaggtagacgtgcatgatcagctgaagatgcttcctgcctcaatccagtaagtgtgatcaagatgttgaaattagtggttgaacaatcagtaatcagaagctcacctttcaaaaagaaaaaggccagctggaaaatgacataattaaaagaggaaaagaaaactctttctcaagaggctgctctttcacaaacagtcagcatgtctgtgatattccgtgtagcatattccgatgacagggaaacacagtggatgtgctgaaagatgagcagcaagtggtaagtggaggtgtttgaaatagaaaagtctattttaaaagacgactaataaagctggaggaggcggcccacactgaagcagtctgagccaacatcctgttgccaagactccagtccccgctgctgtgcccggggccctgggactgtccttggcacagcatgtgagccagtaggaaggagcagaggctagaagcaggggctgggtttctgtctgaggaaaggggcccatggagaggggccccagggaaggggctgcctgtggctttggcagaggagacccctgcccttcctgtgaccccagccagctccaggcatggtagggggatgggtacatttctctaggcgcatgcaggagctgcaccggtgctgggaagaagcaacaacacaacagttaagagcggagacctagagccagaccgagtttgaatcccggcttgtatcacttaatagctgtgagactgtaaacaagttacttaacctctctgtctgtcatcttttcttgtctataaaacttaataatattagctaatcatagggttgcagcaaggatgtaagttaattttgtaaaggatttgggacagggcaaacagtacactagagattgtgtgtattttatatacatataaaatatcttatgtttattatatataatatagctattatatattacatatgtaatacatatataatatagacattatatatatgtattatatatataatagagggatatatatgtatacatagatgcataaaatgtggcctatgagttgggcccacccgtttcttgggcagaggtccaaggctaatcagtgcccttggtcttcaagtaaataatgaagctctgaaagctaatctatgctaacaccctcaaggtcccggtaacccctctctggtctcctctgagcattaggccagatctgcaggaggagatgctcaggcagccccaagccacagcttaggactgaccagacttctccctgagctccaggcccatatacccaactgcccagtgaatgtttctactgggatatccacagacatctctactcatcatgctcccaaacctactcatgacccaattccttccagtgcagacctttccttgtttccagtctcagtgaatgacaatacctgtggggaaaagcaagagagatcagattgttactgtgtctgtgtagaaagaagtagacataggagactccattttgttctgtactaagaaaaattcttctgccttgagattctgttaatctataaccttacccccaaccctgtgctctctgaaacatgtgctctgtcaactcagagttaaatggattaagggcggtgcaagatgtgctttgttaaacagatgcttgaaggcagcatgctccttaagagtcatcaccactccctaatctcaagtacccagggacacaaaaactgcggaaggccgcagggacctctgcctaggaaagccaggtattgtccaaggtttctccccatgtgatagtctgaaatatggcctcgtgggaagggaaagacctgaccgtcccccagcccgacacccgtaaagggtctgtgctgaggaggattagtaaaagaggaaggaatgcctcttgcagttgagacaagaggaaggcatctgtctcctgcctgtccctgggcaatggaatgtctcggtataaaacccgattgtatgctccatctactgagatagggaaaaaccgccttagggctggaggtgggacctgcgggcagcaatactgctttgtaaagcattgagatgtttatgtgtatgcatatctaaaagcacagcacttaatcctttacattgtctatgatgcaaagacctttgttcacgtgtttgtctgctgaccctctccccacaattgtcttgtgaccctgacacatccccctctttgagaaacacccacagatgatcaataaatactaagggaactcagaggctggcgggatcctccatatgctgaacgctggttccccggttccccttatttctttctctatactttgtctctgtgtctttttcttttccaaatctctcgtcccaccttacgagaaacacccacaggtgtgtaggggcaacccacccctacaaataccatccttctaagagagtattgtaaaactttatttacaagatggtgttgcaatcctttagccctccctctccctgacccaatatctcatttctggacaagttgtatccatccttactgtgttcatctctgtatctccagtagtctgggatgtcattgattctcgccagtgtttgctagaaagttgaatgtatgaatgaatgaataaatgaagatggtgcctacacatcatcataataacaatcaaggatttatcgagtacatactgtcttccaggcaccattctaaatgcttggtatatgtgcattccacacatataagagcttgacatatccaagcctcattgtgacgatccctgcatatgtgttgaaagaacacaaagcatgcatgaggaagtcaggtcttggtgggtcctgggtagagcttctgggtagaactttcataatccctcaaagccaatggtgtttccttactttacaaagccttctcagagccaggttctactgagctgtgtccggcccagtacagtgcagtttctggaccgtttttctcccctgccgggaagatgcagaagctgccgcttcaccgagtcctctaatagcaaggccttattttctctgccaccctggggcccttgctcaccatgagcttacttctgtgcagctccacacaacacaccgtaaaaggaaaatggtaattagaagtaacgcttgagcaggggaacttgcgtggaaaaatgctttagttaaaagaagcagtaaagattcctttaaagtgttagacacacacacacccatctagctgttctccttttgaaaggaggagatgagaggacacacaaggtgtattgtgcatctgtaggcaccgcctccttagggcttgaggtcgggccagtcctctagggatcctgctgaagtggccaatgggattgagtttacatctcagtagcccaggaccaaaagtctagcccaaccagatggaatgtagcaggactacatccatagcagggtctctgtgtgtatccaaaacagctgcacagggacaggattgtggagacagaggatggcagcccctacaaggacatcccagctcctgcttccttttttcatagcatttattgtcacccaaagctatgtttttgcatgtttgtttattaccttatcctcaaccagattgggaagcccatggaggtaaggattttatcagtcaagttcacctctgtatgcatgccatgcacagagcagggcacatacataattggcgttttagaatatttcatgagggaagattctttgattgcaaactgcagaatcctgatgtcccaaatgttgcctggtgcatcataagcttctagaacacaagctttaagagagcagggtctttgcatgtagcattccagtagctgttctggagtgagggttagcacgcttttcctataaagggatagagagaaaagattttcagctttgtgggccaggtggtctcagccacaactactcaattctgctgctgtagtgtgaaaactgacagacaatatagaaaccaacaagtgggcatggtaatgtctcaataaaactttatttacaaaaacaggcagcaggccagatttgaagtagtcttccaacttctgctctagaatataaactccataaaataagggattttaaaaaaaatgtagatccataaccagcacttgcaacagtgcctagcacacaataagtatgcaataaaacatatgttgaatgaatgagtgaggggctaaaagtggttttagtcaacagcttgctgtgggtcagggtcattatgtgtgtagttatattggcctactgagctaaagacactctggaagcagatactggaagcctcctgtgttctgggctagttggatgacacctggaatatcattcccaaagctaagggtctagagtgcatgtagaggacagggcctgagatggggcagagacaggtgaccttgtgacatggagaatggtggaaggaaatggacagactgagcctagagaagagaagagtcagggaagagacagtttatatatttcaggactttcatgtggtagaacaatgagatctttctaagaaataagagggctatttttagaactttctgtaagttaggtagaccttggtgagagtgagctctcactctactgggagcgttcaaacagccatggggatgctgtggaagggattcacatattggaagggggcaggattagatactgttgggtcacttttgaccccaagagccattctcacatgcagcactgcagcacaacagtctgcaacactgtttcccaagcaacagatggtgactgccctccagacaaaaccagaatcccctgacttgtataggaggccccttagggttgtccctagccttctgcttcaatcgccctgttcccatctcctgttatctgtaccaccttcaacgaacacattttggcatttctcattcccctcttgtttctcctctcctggcctttacacatacgatgttgtattagtttaggtttctccaaaaggagaactgaggcaaagatccaagtgggtgtagtttaagagttgatcctaggaagcatggagagggagcaggaaactgggaaggaaaggcagctagtaaaagttacattagcaaacccacctttgctaatgctgtgctgactggagcttaacccactggggagtgtctgggagccagtgtatatcacatcacagagtcatcctcccctgaagagtgagagaactggggtatttatacatcaactcccatcagtcgttagttgaggaggtgtggggaggagggttgaatgttaattttctagcacctccaggtctgccacttacatgggcaaaagtgagctttggaaacaggagaaagccctgaggcaaagaactgcaggtgtggcagttggaggtgcagcactgatgtgattgagggtgaggggccaagagtagggcacccagccatgtgtgctgaaagctgccttctgcttggaactcccaccccactcttctgttttgattttgatcccacttcatggtcacattggctgctatgtaggaataaacagctcctggttcaagagttgtgatgagtaaagcattgattcactcctgctcaaggtcaaacgtgagtttggttaggcagttctcatcgctggtcctgggaaacagatcaggttcacttatttgtgcaaaggcaggacatatgtgtcctgctgtgatggacacatgtcttgataatacaagacagcatcgacacaggcctcattgaccatttcaccacctggtcccatccagtgccattgtaaaacataccttctacctactcaggaaccactcatttgggcccttagtgggagatggttcataacctccttcagacgtaattccagtgccagtcctcacagggtccagatcactacggctggtttagctcccaagcccttgtattcctcccttcctcctcactggctcccagcatgccttgtggctgactggcagaatatagagacaaggaaaagagacattccaccctttccatgtgcatcctttattcattcactcatgctgtaaatattgagtgcctactatgaacaaaccaggccctggccctgtcctcatggagttcacggtctagaggagaagacaaacatttaatcaaataaccaaacatatatgtaattacaaactattatgaagttggtttggagatttgcagactgctggcttcttgacatctggggaagaattcctaggcctttgcaaattcttctgtgtgggttcagggtggaaagcagtgtatggtagagaccaaagcagatgggtgagtgtgctgatcttgtggaggcttggtaattatagctggtgcattattaataaacattctgtctctgcttcctagttacgtacagttgcttgggccgaatgctgttaagcttgaaccacgagctctaaattgttcaccttgtcttcctgtttaatgaaaggttttaggaagtacagatctgttagcaggggagcacaattgtttttgaaatcaagagagcccaagaaatcttagggaagtgctggctgatgatgataatactggagtgtctgatgggcaggtggaggtcccactcagcttcgtaataggtgaagacagccagaggggtgaggaagaaagaagggtctgctgcttgccctttcccaggaagcccagttgaaaacctgagggatggagctgctacacttgtttcctaacatcatctgttttttttttcttgctgctgtgaattgctttctagttctcaagagcataatgcaatatcaaccattttgactagagctttgtccttgggagggagttttcacatgaacaggaggcagcagaaagccaggaaaaacagcattgacacgttaggtccattacaccccagggaaaactttcccacagcaaggtcactagaggcagcctctacacacaatgactcctgggcagaattctgcccttggatagatagggaatgaccttggcaaatgcagaagccatttggatccattttcagaccatcaaatttggcttgagagaagtagaattaaaaataaaaatcaattaacactcttagtgtcatttgaaaagtgaaaatttcatgggttttacattcagctgtgtgaccctggatttaaggcagcagtgacctggggtaagtttcttgacatctctgagcctgggatttctcataggtaaatgatattcattcaacaaacttttactctgggatataatgtctggggatgtgggaagctgtagttttaaggccaggtacaggcctagggatggaacaaaagagaggtgcatggggctctattccttggtgaaacatagaaagatggtgaaagaaatctctgttttgggtaggtcagacatcctgcaccgcatgaagcacatgtttgaaaacggccactacctaagagtgtcaccaccaagaaccatttaattactcaccttcaggcagcaatggggagggaagggagaagtccactcacatttcctgagtgcctcctgggtgtcaggaagcaccctataaacatgcatgtatcacattgagtctccatctactcagctgggaaggtgttacagttctccttttacagataagaaaatggaagctctgagaagtgagtcaacatccttgaggtcaacacagctaggagacagcagagctgaggttcaaatccagatttaactgcttccaaaattctcacatttttttccatcaaggagatatctaagctcctatctagatctccatccccacagacaccctgggttggttcggttttgggggatgagataggacaggcatagaagagtgcatgtgtgcaccctgcacccacataggtagttctggtaccttctctatccccttctggacaatctcagccaaatttatgacaacttctgcatgcaggtgacctccaaatttcagcctttagcaccaagctctctgttgagtgccacacccaaatatccaaatggctatttgacgtctgcagctggatgacctatgggtactccaaacccagagtgttcatgagtgtccatgcatgcccagattgattacaggcttcctctcctactcactggctcctcctccattattctctgactcaatggataaatctgctgaagttggtgctctttacagctccgtgatcagtcagcccaagatctttgctctaatttctcagtcatgtccttcctcaaatgattcttcctgccatcttccctaattggagcacagaccatctcatggagggactgtcgaagtattctctcccctagggactctctctgttctccaactcatactttaacctattgtcagtgtcttggtggaaggtgcaggaccttattaggtggacattgggagatggtcatgtgggctagatctttattactcaaagtgtggtctacaaactggtagcatcagcaacgcttgggaacttgttagaaatgcggaatctcagactccaccccagacctgagaaatcagaatctgcattttaatgggctatccaagtacttcatgtgccatattaacatttaaggagcaccaagataaagtgaacagcaggagcaaactgcaaaggtcaaaaagaattgagcattttcagtgaaatatgaagaaaattgtttgaccagaggggaggggagagtaaacaaaaatctgacagctggaactctatgcaaggccaagacattactctgtgcatgttaattccacaaagccactctaggaggtattgtaatccctgagaaactagaaggacttggaaggatggtcattatattcattcaaagatcagggaactgaggctaacaggtggtaaattatttgttcaactttccatagatagtaagtagtacggtcaggatctgacacagacttctgatctccagtgctccagttgcctcagtttaacagatatagcccatttccccatcaccgacctttgcagagctgtggttttccaacttaagtgtgcattaggattacctggagggctggttaaaacagatggcgggccccaccctcagggtttctgattcaggagctctcaagaagggctggagcatttccatttataacaagttctcaggtgatggtgatgctgctggtctggaggccacatcttgagaacctaacctgtgagactgacgtcatctacaggtaagcttgttggaagaatagctgcttatcaccatgtgtttccaaagactgagatggttattggctctcatagctcacttcattttttccttacaactattcaatgcagacaatatcacttcccatttacacaggctgcaactggtgctcagaaagattcagtgtatttttttgtggtaacacacttactagaaggcaggcccatacaagcccattaacaactctagccttgtagtgtacagtctcaagttgggaggtcattaaggagcctcctactctactttcagttaaaagatggggaaatgtaggcctggagagcaagtgagctgcctggagttccacagcaacataaggggattgccagctggggaaccctctcttctgaccccagggctagtcactggctcttccatcagctactatggaactctatggactttggctccccaaatattcaccaaggagcattgctcaggactttagacacttttcaaggccacgcatattggcttgacagaccatagcaacaagagccgacagttatcacgtacttactcggtgctggtcacttttcagttaagtgccttggattgacccacctgatccttgctgcaatgctatgggttgtcctttgctgtgctatgagatggatgcagaggtcagctgtgatctctgccctaggggaaactcaaagtctagagggggagacaggcaagctcacagaaatctcagtgtatttaaataacaataggctgtgcacagtggttcatgcctgtaatcctagcactttgagaggctgaggtaggaggattgcttgaggtcaggagtttaagaccagcctgggcaacatagtgagatcctgtctatacaaaataataataataatatcaaaacaatagtaacactttggtgaagatttgctacttgtcaagtcttcatttgggttaattgatttgatttttttatagccaactatgaagtaaagaagtattattaccatttttacagctgaggtaactcaagcttacagagtgagtgtgacttggaaatgccagaagtttcaaaggagctgagtgcaggtctttctgatgccagaactagcacttttaaccctcttattacaccacatgtatgtgaatgtgtgtgtccacactgcacaagggggagcatcacccttggcttatgaaaaaaatgaaggcaaagggcaggaaagatatttatccaggtagagattatggtttttcaagcacattgctgcaaaagaagccaaggccagtcttcagtgggccacactctgatgtgctaattataagtgaactcttagctgttcattaaagatagatctttttctgttcctttatttccctgcaagcagtcttgacagcattgcttttaaaaatattctgtaattcagagcgttacacttcactaatttaccccctgcatctcttcattacatcacaggcaccccttgtcttctcatcttcccctatgatccctgagtggggttatccctatcctcagtcagtgaacatatttagctgaaccctaaatcccaaggattaaaggcaattaaatgagataatgcatatggcgtcactttaaaaccataaagggccgcacagatgcgaagggttattattatgagccttccctgttaatgagtattaatgagctaaggctgcagattcctaatgttacagagccctaatattaaccatatggaagcctaattttcaaagagaattagaattaactggaagaagaagctgcaaaaaattttgaattcaattccctctcctaattcttggtatcttgaccgcaatctgcatgaagctaaacggttatgtgatgacatactggtttatctttattcttagctaattgctttaggatacctgcccccatattattctgcattttcatggttctcttgatagggacctagatttttttttctgcgaatgatgtaacatgtctaatttgagctttagggtatatggatactggaattgagagggcacatcagaatccaaaatatttcaagttccttaaagtcaaggagtgattggaaacacctgcagccaggctgacttcgctgagttgtgacttgagatattccatgtaaagttcttgcacagagcttggcacaaaaaaatgtaacattattgtccttatcatttttgagtctctgacagatacatagacagggttttagatcacaaagccttgaagggcagggtacacatttaggtattattttctagactgtggggagccactgaagattcttggggcggggatgttgagcacagttttgtgtttttggggcttttaactctagcagctggtataggagggaatataaccactggtgtcaggaaatcaggtaggaaactgtttcaaaaatctatgagagttgataggggcctgaactgggcaaggccaatgggctggggaagaaagtttacacacaagagatttttaaaaattagcatagatagaacttggtgattgatcagctatgggctatgacaaagagtgagactcaaaaagtctaggtgattttttaggtttaagttactgggtgaaggaagccaaccaggatgaatacaggagaaagagctgctttgggggtgaaaggctgagttatataagtagagccaaagccttcattctagtggttggcatggctgttgagttccaggactatttgggaacagaacatgccaagtaaaatgaaagtataaaatcagaaggatcttgagtgatctcttaatccagtcccattattttataattgaggaaactgaggctcagagaggggaagtgactttttgaaaaccacacatcctttattaaggaaccaggtctggtttctgagtccctcaccacctcagatcagagcttcttcctatcccacccaaaatgtaaagacagaatctgcttcaggctacattgttttccagaaagaaatgagactttgccaaactctgggggaatttttcaagctttgaatatatcttgtttccttttaaatgagtcctagtttgtagacatatcagtgcctgaacatagacacccacagaatcacccacaactatgattgaggggaggaggtgtcgagcagacagcatgggtgccttgggagagggaaagggaggtgggaatgtgggaaaattgtgctctgggctccctgagaggtggtgtgaagagggcagcactaacagatagggaataaggcaggttagaggcactggtgctgggcgcgctgagggaaggggaccagggatgccatgaaggccaagacctaggggttagacccagccaggagaaaagaaaggctttttcttgaagagctcaaaatatctgccttgggcaaacaagatggaaactcacaacctcacaagctcttcaatcacccatctctgggggagtcaatgccataatgcacccatgccaacctctgtgcttgaacatctccagtcacaagggaacgcacttttaagttctatccccttagacctctagtaggtaaaatccattctcccactgatgagtggagagagattcctgagaatgagcagaaatctctccttacaatgtttctctgtggctcttagtttttgttctttttcccctgacatttacacctgtatcactaggcagattacatctttctacaagtcaccaacaatagtttgggacagaataaatccaagaacaaagctcaagctccatggcacactatcagggtacagaatttgccaagcacattctgcaaagtttgcaaaatgaagatggggcctgattggagaagctggggaatgaatccatgtgccccttgcatggcctgctgttccaacctatgatggacaggcaaccctcctcaggaactgcaatgttcttgcccagggtattagaatagggggcaagagagagattcaccccaccaagttacttgctcaaagtgccatggagctgtcagcctagggagggaacagccactgccttgttctgccctaagatgccacagggtgtgtgcctaactttgacacacacacgggttgcctgcccctactgtgtatcattggggatctctctaccagatggaccctaatcctttgggaatagctatgtagccaattgatactttgctaattgctcttttattaaaaccatatttctgcatattatccatctaacatatatatctctccatatagatttatattgattacctattttctccaaaagccaggagtggtggtcccttttgtgcagcatggagacacacattcacatgcaggtggcatgatgtaatgagagggttaaaagtaccagctctagagtcagaaagacctgcattcagcttctttgaaaccccttgcatttgtaaatcaccagctctctaagcctgagttttctcattgtaaaaatggtaacaacactcctttacttcatagtgcggctgtgaaaaatcaaatgatccaaatgaaggcctgacaagtagcaaacactcatcaaagctttactgttgtttttattatatataaatacactgagatttctgtgagcttgcctgtctccccctttagactttgagtttcctgaagggaagggaccatagctgacctctgcatccatctcctagcacagcaaaggacaaccctgtagcattgtagcaaggattagatgggtgagtacaaggcacatgattgagcagcgacctgcatggagtacgtatgtgacaattgttggctcttgttgctatggtctgctaagccaatatgcatggccttgaaaagtggtgtctaaagtcctgagtattgctccttggtgaacatcgggggagcccagggcccagggagggtccatagtagctgatagaagagccaaggactggctctggggtcaggagaaaaggttttccagccggctccttccccaccctgctgagtagcattagcagaacccaaaagagacctataattttaggagagggccaagtggtaggagctgtggccttgggtaggggaatgcagccgtggcttactctggtttagcaggacttaagaaaataaatgtcttggctttcctctacgtccactcttctatctcctccttgtgttttttattggctaagcctagctgaaaccagagagcaagagaggttggtgatagagccatagaagtcattctcttgggattcataggagagtagggatgggcagggtggggcaagggtgggtgaatgagaatgtccagccaagacccaggcactggcctcctctcatgcaagcagatctccttgatcttctaaaccaagccacagaaccctatcatattttgaacaatttttcagtcccagttccttggggctttagcttccctatccattttacccatcagtgtcacactcataccagccagcccttggtgatgtgtcaattttccatcttcacctgacttttcaaaactcaagtccctggggagatctctatgtgtaggctccacctctcttcctggagccacaaatgctcagaactggggctttgagagctgccctgagtcgtcatctctgtcacatctgatgacagtttttattaggactttctgaaagctgctttcagtttcaggatgtgtgtccaaccttttctcagccattaggaaccctgagctgatacagtcactttccctcaaggcatctgtcacttacagtttgccaaccagttcctccttgctggtcatcattagggccggagaagcaggtcccactgggagttgaggtagtgagggagagaagccaagaactttttagattcatgtctttagtcaaatgagacttggaatagccatgtggcaggttaagccttccatcacttttagagttggtcagtcccaggcccctaactatgcccccttgcagtccctaaagacctgtcttaatttcatcccagggcccagtacctactctcagactctctggtagctattgtggcctgctccctcatctgcccaaatgcaaggaactagaaatagtgcctcattgcagcccctcgtcattgtatgatcccaacctactccaaatacccaccatctatctacccaattaccactgtgcccttctcaatcttcttcagatgaactgatcccttgggtggtagacagaatagtaatcacctttcccctcaaaatgttcatgactgaatccccagaatctctgaacatatcatcttatatggcaaaaaagactttgcagatgtgattaaattaaggttcctgagatgcgaagattatcctggattatccatgtgggagtcaatgtaatgacaagggtcttcataagagggaggcaggggtcagatttaaagaaggtgatgtgatagaagcagaggatggagtgctgtcatttctggaaggggccatgagccaaggaatgtgggcatccctagaaactggaaaaggcaaggaaagtattctccctggagcctccagaaggagcagagcccagctgacccctttattttagcccagtaagacctgttttcagctttctgatttatgcaactgtaggagaataaatttatgttattttaagccattaagcttgtggtaatttgttacagcagcaataggaaatgaatacaacctgctactcaagaagtgtggtctacagcaggggtccccaacccctgggccatggaccaataccagtctgtggcctgttaggaagtaggccacaccagcaggaggtgagtggcaggccagcgagcattactgcctgagctctgcctcctgtcagatcagcagtggcattagattctcatagaagtgagaaccctattgtgaactgctaaagcgagagatctaggttgtgcactccttacaagaatctaatgcctggccgggtacagtggctcacacctgtaatcttagcactttgggaggccgaggcgggtggatcacgaggtcaggagttcaagaccagcctggccagcacagtgaaaccctgtctctactaaaaatacaaaaattagccgggcatggtggcgcacgcctatagtcccagctacatgggaggctgaggcaggagaatcacttgaacccaggaggagaggttgtggtgagccgagatcatgccactgtactccagcctgggcaagagagcgagactcagtctcaaaacaaaacaacaccaaaaccaaaaaaaaaaaaaaggatttaatgcctgatgatgtcactgtttcccatcacttccagatgggaccagctagttttaggaaaacaagctcagggctccaactgattctactttatggtaagttgtatgattatttcattatatattacagtgtaataaaaataaagtgcacactaaatgtagtgcacttgaatcatcctgaaaccatccccctgactgtggaaaaattttcacaaaactggtccttggtgctaaaaaggttggggacggctggtctgtggcatcaccattacctagtagcttcttagaaatgaagaaccttcatcctcaccctggacctgctcacccaggatctgtagtttaataccatatccaggtgattccaatgcatattaattggtatgcttttgtcttccccaggacccctacctgcagatatttagctccaatttgaaccaattcaaattagaaaggatccagtccaatgaaagaaatagatttgttatgagaagaaaaaatgaccaccccctctaccttttttttccctcacctcacttttatctaagtatagctaataaaggaccagatttttaagaattatttttaaaaatttacttatgtctttaatgccttattattttttcctggtgctgaggttagggtagaagtaaattttagattctgaagctgttaccataagccaatcgttgtcctatccccatcacatttgttggggactccctgcattactggccctgaataaccactgagtgagaggtaggggtatttcacaggggtgataaagtaggatgtgtctcaatggtggaaattcgatttgcacgctgctcaaccagaatcagcataaactctgagccttgctctggccatgacctgggtaggtagatagatccagatttatcaatggctctgaaacaaagggaaaaccccacacactatgggaggccagcactgaccaccagatgaacaggaagccttgatgtatatgctctcataatatatccttctgtgtgaaatactacaaatttctcccaagacaagaagttgttacattcattttttggcaagtacaagaggcagtcatcccacaaagtctaggaaaggggatatatcttttggattgcaacccctcaaatggactcctcaagtgatttggggtactcttcctgctgccccattaatggggacatctggttctagacccagcccctcctaatttgatttccatttgctgttgagcttgaaactcctattctggaattgccagaatatcctgaattcttcacaaaagtcttcttgagggggaagcattaatagagctccgtagagagccatgagtccttctctccctaaggtcttgatacaagagagtcttgttaactgtcagccagtatcacactggttacctcctggagcctctgtgggaaagagcatctcaatgctttgagggagactttgggttgaaataggtttccaggataattaacaccaattgagaacacaggcaaaacttcttgtcttccaaatttgaagcccacattagctaattagttctaattagaggctgacagttccatgtggcacagtgagcatgtaataggcagatgtttttgtatgtgtcttgacaaattaatgaagatgggttgggggatttctttacaggcccatgggccagctaggtgctagaacatatcttttcttgggaaagggttttggttttggggaagcttacgtggtgcccccagaggaagcccatctattgataataatgcctttatgtattccagaaacacatagtgagcacctacattggcgaagaattggtcgaagtagtgaaggagacactactttcactatgtggaatcccaaagtctagttgggaggcaaaaataaaccgaaaggatccagtggcatcctagccaaagcagtaagataagaaaaatacaaaaggagatctaaatattaggaagatccaaaatgccacagtttgtatgattccatttatatgacatcttggaaaaggcaaaattatagtaatggaggacagatcagggcttgccggggtttggggatgggaagaggtattgactaaaaaagggcagcacaaaggaattgtttggaattgttctgcatccttattgtggtggtggttatacaaatctgtgtatgtgttgaaactcgtagaaccgtatgccagttttcctgcatgttattttaaaaaatgaaagaagaaaaaatggattacagcttatgtatggaccaacatctatgcatctcagtgtcgaataaaacccacaaatttattttacattgtttgaattttcagacaattttgaaaagcatgtctttaaaaagtaatccttagctcagtttgtatacatacgtatttttataacatgaagatcttttgcattaatgcataaactagttgaaataaacaaggaaagaattgtaaactttaactcatataaaaataaattaacataaaagtgttaaatttgggtttataggagatatggagagaatcctcatggcatttgagactctaattctagtttttcctgagcctttgggtttagtgaggtgcctcaatatcctcatgataaatttaccatacttgtttagcctaaaaaataccatgatttataagtgacatgtctgtctatataaaaaattcaagagactcagctaaaagtagttgatgctaataggagtgttcagtaaggtagtgggatgtaagatgaacatgaagaaaaatagcatttccattgattagaaatatgtaattagaaaatacatataaaaggatcccatttataatagcagcaataaaaacaatataaaactctgggtaattaactaaaaatagtccagatttatatgaaagcaaatacaatactttactgaaagccatgaagaatggctggaatcaatgaagagacatatcatggtcctggattggaagagtcaatcaaaagtgtaaagatgtcagtccttcccaaacttatgagtaagctcaaagcaatctcagtgaaaatttgcgtgagcaaaagcataggggacgtgaaagctgattcctcagaacgtaagcaatctaggcggactgactgaagcattggtggtgagagtatgaggtgttctcctgggaccagactatgaagagcctaggctgctagactgaggaccatgcccttcatctgacagcccataagaaactctcgaagatttcagttcaggaactaataagatcagaactgtgtgtgagaaatagatcttggctgatgtgtaggattgaaggaaagggtgagacccaaggcagggaccctgaccaggaggctgctaactggaatggtctgaaatgactgccatgctgcctgatccaaaggagtttcccagtgaatattagcactctcccctcccctacaccccactcccctgatcttcctttctctccccttccctcctcctctgaagcaaaaacccagtggagaaatgaactaacagagttgccctgagagggggtgagatattttctgccaatctggggtcattggggagggttatcttaaggaagatgccaaggtttggaatctggaagcctgggtggacaatgatgatgataaatgctactttaaatatttatttatttatttatttatttatttatttatttatttaagacagagtctcactctgttacccaggctggagtgcaatggcacaatctcggctcactgcaacctctgccttctgagttcaagtgatcctcctgcctcagcctccccagtagctgggattacaggcacacaccaccacaccaggctagttttttttttaatttttagtagagacggggtttcaccatgttggtcaggctggttttgaacttctgatctcaactgatccacttgcctcagcctcccaaagtgctgggattgcaggcgtgagccaccgcgcccagcctaaatgctactttttattgagcatccactatccgtaagacaggaactagcactatcccattttttaatttttaaaaaaaatttttaatatattttttatttttatttatttatttattttttaaagaggaaacaaagaagttaagtgttcagaaagctgaggcaggacctaacctggtcactggtcatatcaccgacatcccagcaccgggtacaaagagttcagcaaatgtttgctgttcaccagatgttgcttctctagaaatgtccttgctgtgggtttggctgatgccttatctttatgagtaaatcccttttcctttcataaataagtcaccattttgcaaggaggggaagagaagcgttgaacaggaagggtggggaggtaggagcagaaaagaaggggctgagtaatggaactcgaggtgtttttataaattaggaaccacccagcttgccactgacccaggcatctttatcaatttgctcctccaggccatgccagcctagcacaataaagcttcctgtccatttcaggcttaatcacacagaatgtaaatccctcagcagagaggcagctgcgagggatggggcacaatccgcagggctgttcattttcatcttctggcacgtaatgaaatcaggaatgcatgtctgctcaccagggcttctttgctccaaattgttaagtaagcatccctgctttagcctcattagactcccaaggccgctgatgaagggggatggaagccagcatttattgaatgattctggtgtgctagatactttctacgtgattcactcctctaaaaagccccgtgacatgggcactattatccttattttacagctaaggaaactgagctcagaaaggtcagcccaagatcatggacggataaaatgagtagggaatcatgaagcgacatatctgtgcaatttcaaatcctataccccaagcctttttttttttttttgcagttattagatataaaataacttttatataattttggggggatttctgggagaagtttgagggaactgaaggttattacttttcataattcattttggttgtgtcaatttaattaacattcactgagactctgatccactgtggctctgatttttaggcataacttgtgtgtccatcattcatgctaaatagagatagtagtcctgtcctctgcttctgctcctttttcttcttcttagtttttagacatcctggtttgtgttctagttcataatatctgccctaagatcttcattcttattttgaaaactacatttagttcctcttctaataccccttgtcctgcctcatccgattcttattttgccccttgtactattcagggacacctgcggctccaggtcagagatgcacctgctagtcctgcctctacaggacccaacccatcagttcctagcttgtccttctggtgagaattgagcacactatactgtggacataaagacaagtaagttgtcattcatgccctggatgaacatggaacctaactgggaggtaaatacacacctgaataattaaaaaataagctataattgaacaaatgctagagtaaagtgcatacagaaattttaggaagttggtgggtaggggagtaaataataatgtgttgttccttaagtcataataaatttcaaaatatctgttaacatctatttcctctattcccattactatgtgaattcttagttcctgacaaatgaattagttgaaacagtaacattattttggtatttttatttattgtttattcagtctgggtcaacatcatagaatgctgaatcagcaggcaattccacaataatctgcttgagtacaagaatttgaatatgatatgttgtagggatagcaggataccaatatggggagtgggtttgggtagccccccatacccttaagtgaataaagggctaggctggaaagttatgaatgtggaatggatggtttgagaactccagacgtggggcaggtcaacactgacctcttaggaggaaggagtttagatgggataacattttgacattccctttggacagggaccctatggattaagtgggaaagctagagagggagaaggaagtggttgttcagataacataggtgggacttccagattcaggtggcatctggctgtggcacttgggttcccttttctcctcacccgtggcacttctcatgaagacacagaaaccactactactttttggtaacatggattctgggccttgggtggagtttttacttagtaaagcaaggatgatactcttgggcaaaagaacagaaaaatacatgataggagattttcagttattactcctatctacttcctgccttaaaggcagtgtctccactgaacaaaaggagagaaacccgcacttactacacagaagctgtttctgaggccatttaacctccagcactccctattatcacttctattgatttaccatttgtgggactaatttaaactttctagaaattaaaaaagcaggaagggatcgtggcagatgaaaacaggatatggatctttgcatatgtgtcttagtctgtttgtgctgctaaaacaaaatgccatagactaggtaatttataaggaagataaatggattttttcatggttctgaggatctggaagtctaatatcaaggcgctaacatctggtgtctggtgacggctgctctctgcttccaggatggctccttcttgctgcatcttccagatgggatggacactgtgtcctctcatggcagaagagtggaagagaaaacacccactccctcaagcccttttaaaatgccgtaatcccatgcatgaaggttttgctttcatgacttaatcaccttttaaaggccccacctgttaacactatcatttgggtgattaagtttcaacatatgaattttggggtgcacattcaggccataccaataccagactgtgaaatcaacgaaattgactgtgaaatctatgaaagagtagagctagagagacctgtgagacagttatatgctggtgaatgtaaatgtccatgcattgcttttcctaaagcagagacggctgcatacaattatcccagaatattccctccacatgttccgaagtcagcccattctggtctagaatacacatgagaataaggactgtaccactaggaatttggaatctgtgcatattaatcagccctcagcttaaggtctagatgtggattctaattatagtcatgtagttaataacaaggaccaaagaagatccatccaaactatgtactggcaacatgcctgaccagctttctcctttatcaagcatgaataataggaaaaacaaaacaagagaccttgaagatttttctgagacataaaaaggagaatactagattcagaagaaaaatgtcttgaaaaaatataaaatagttaataaaggcatttactaggatgcgtctttttgtgttctcagtaaatttgaacgctgagatacaagaaacgacagatgacatagtaagattaaaagagttgctaagatgcaagcagaaattgagataaagattgtaaatacctgtaaaatccaatagcttaataaaacttgtattgggattagaagcagtaaagaaaataaataatattgcagaaaatggagttggtgttaaggaagatgcagttaagaagatctcctggaatgtagagaaaaagcccagggaaagaaggtagttatcaatggggaggatatatggaggacagagaatggaaattctgggctgtagggacaaaagatggaagcagtgtcactgcgcccaggggcagggatcaccaagtagaaactggaaaaagagggagccttgtccagcccaagttggagtcacagaagggatgcagtcaaggcaaggaagagggggaaatacccttcttcttgctttccacactgcaatcttctgccagtctgtatctctggccaaacctatcctgaagggagcggatgagggaacctggaaaatgcagcctgtatgggtcagccctactgtgataccaaataagcaacggaaagggcagggatgggcatgagggcaaaaacaggtgaaggactggtctatacaacttagaagacactttttacaacaaaaactgcctgagtcaaaagttgatttgactgacacaaattaaatgtatcagttaaatacgtgaaggccaaacatgacagtaaatggattaaattcctccattaaaagaagatctgtcttagatttggtttagaatccaccaaagccaattatagctatttgtcaaagcttcacctaaaagaggcaaaaaaaaaaaaatgctaaaaataaaaactgagactaggagtgacaatattaacatcagtaaaaaagtatagtacaaggtaaatataattattagaagtcattttatgccaatgaaagaaaattcacatgaatgctatgatcctaatttccatttatctcagtgattctcaactaagttggtaaaagatgccccaaagatcatatcagagtctaagaagtcattttataaaaactcacatacacacatattctgatattcagcgggagggggcaagtaatcccatttccactgacccagaattactactgatgggcatacattgcagccttcagatgttgtggcaaacaaccaaccaaccaaccaaaaaaaccctaaacaaacccaaaacaaaacaaaacaaaaaaccaaaaaaccatcatgtagcctttggtttaaaataaatgtatgattagtaatattgactttgatttaatagatttggattaaattttgtgttctgaaaatggcaagaaaattttcattgtttttatgcaataaaacatggaacatttatcacaatctatactagtttataaagaaaattgatgatcaagatattggaaatgattctggataaaatctctgataagaatgaaataaaattaaaattagtttaattttataaagtgtcaatgaaaaattccaaacatcagttggctgttaacatgtggctttatttctggattttctatgctgtcccattggtttatgtgtccagctttataccaataccatgctgttttggttattataattacgtttttgaatgctgttggatttgattggctaatgttctgttgaggatttttgcatctctgtgcattagggatactggcctgtagtttttctcttttacatgtgtgtccttatctggttttactatgagggtaatgctggccttgtagaatgaattagggagaattctctcctcttagatttttgggagtaatttcagaaggattggtattagcttatctttgtaagttttgtagaattcagctgtgaatgcatctggtcctgggcttttctctgttgggagagtttttattactgattcaaactcactactcatttttggccaatttaagttttctatttcttcctgattcaatcttggttggttgtgtgtttccaggaatttatccatttcctctaggtttttcagtttgttagcatatagttgttcataatcatcttttgtttttctgtagcatcagttgtaatgtctcctttttcatttctgattttgttgatttaagtcttcccttttcttgtttagtctggctagtggtttattgactttgtttatcttttcaaagaattgacttttttcttttattgacttttgtatttttttagtctctatttcatttagttcattctaatctttactatttttctgctaatttggggttttgttgttttttccttttttagtttctttaggtacattgttagactgttaatttataatatttccacattttgatgtaggcatttattgatataaacttccctcttagcactgcttttgctatatcccacaggttttggttgttgtattcccattttaatttgtttcaagaaatttttttattttcatcttaatttctttgttgatgtaatagtcattcaggagcattttttaaatgaatttgtatagtttccagagttcctcctggtattgatttatttgttttattctattgtggtctaagaagatacttaatataattttgatttttaaaatttgttgagacttgctttgtagcttaacatatggtctatcctggagaatattctatgtgctgatgaaaaaatgcatattctgtggttgtatagaacgatctgtaaatgttaggcccatttggcctaaagtccagtttaaatccaatgttctttgttgattttatgtctaggtgacctgctcaatgctgagagtggaatgttgaagttccccaccactactgcattgcatctatctctctctttggacctagtaatatttgctttatgaatctggatgctctagtattgagtgcatatatatttagaattgttagatcctcttgctgggttgatctttttatctttatgtaataatgttctttgtgtgtgtgtgtgtgtgtgtgtgtgtgtgtgttttgtttttttttgttttgtttttttgtttttttttttttactgtttttgagttgaagtctgttttatgtgatagaagtacaactattcctgctcatttttggtttccatctgcatggaatatctttttccatctttttacttccagtctctgtgtctttactaataatttgagtttcttgtaagaagcaaatagttcgatcacatttttaaaagactctattcagctattctctctttttttcattttataaacacttggttttattgcacagaagaagttgaaagtggactccagtggaaagtgcgcactggcataattcagtggccagtgcccagccccacctgggcagctcttctagaatagagagctctgggcaagggcttgaccactcctttggaaaacagaaggcatgtagaaatagtttaagacatgtcaagcataatgtgtttgtaactgctcattcattattgtggtcatctgtcagttgcacatggaggaaataaatgcacttatttggaaaggagggaggcagttttttatagtcaagagtttacgtgtggcattcagcatgtaccacattcagctacataagctttcataacaattgtccatcgcttggggagggtgtgggggcagggggctgggagtgccctctcttgctaacatattgctaacagaaattcctgtttgaagaagaaggccccatcatctaagcagtttcttcttacattaagagagaaaaagtgaaaattgcattactccgatccttgagctctgggccccttctgagtttctttggctgctccagacattcctttctccgtgccttacttccccttggcagccttgtcttctgtggctttctctggaggcctgctgtctttttggtctgtgctggaggatttttcagccttttctgctttatgtttgcttgggtcccttgagagggtcttgtcatcctccttggttttggcctctgtcttgggtttctcctcaggcttcttggcctcggtggccttctcctccttggtgtcttttttctctggtgctgctgctgcctcctccttctctgctggtttggtaggtcccttggctttggcatcatctggttccttcttggccacctgtcatctctttgggtttagcgtcttccttcacctccacattggcaggagcctccttctctggggtggctgcttttttcttatctttagtctcttccttcttggcttcaactttggattctttgggcttttcgagcccaaacttgacttcagctgaagattttgcctcttccttctcagaggacttcgcttcctcctttgttggggacttggccttttcaggccttttcaggggacttgacctcagctggagactttgcttcttccttcactggggacttggcctcagctggtgactttgcttcttccttcactggggacttggccttctctggagacttggcctcagctggtgattttgccttttcctttgctggggacttggccttctcggggaacttgacctcggctggggattttgcttcctctttctctggggacttggcctcagctggtgactttgcctcttcattcactggggacttggcttccttttctggggatgtggcctcttctgttgggggagactttgcttcttctcccccttctgccccctcctcttcaccctcttcttcctccttgccctcctcctctctggcctctttctcctcttcttcagtcacttcttcagtcacttgggtctcctccatctgttcccccacaatcacagtttctctgacttctctaccactttgatcttctcttcacttttgacctttatgtgagtggacacggagggaattttggggagtccttctggaagcgagaaaggaattgggccgaagctagtccgacactcttcgccttccaggagttttctgtaagcggctatctctatatccaaagccatctcgacattaagcaggtcccagtattctcgcagctgggctatcatctcccacttggtggtcctcagctcggcatccagttgctgaatgacttcctcgtaggaggcaatgttggcctgatgacggtcctccagctcagagcgctgcctctccagtgagcccttggtgcttttcagtgcctccagctctgtggtcctggcctgcagctgacgccggtactcagttatctcctcctacgctgagcacatggcatctatgttcaccttcgctgcctctaacgtcagtccagccttactcagaaccactcctcggactgcagcgtgctctgcaccgcatggccttcaagctgcacgccgcgccgatctcgctcagcgccgatgtcacttcgcccttgagagcgttgcgcaactcagcctgcacctgcgcggcgccgcagccctgggtctggccgagcagctcgaccacctgctcctcctggtagtggcgcgacaggtagccgcactcctcctgcagcgcttgcacctgcttctgcagttccacgcgcgccgcctcggcctcctgcgtgcagcgcgtgagtgcgcgggctgccgcctcggcctcctcgcgctgccagagctcgttgtcgaggcgctggcacacgtgcgcgatgtcctcgagcaggtgctcctgttccaggcgcagctgcccaggcgcagcatcgcaccgcgcgtctcacggacctcgcggcccgcctgctgctgctgcagggccgctgcctcgccctccaggctgcggttgtgcacctccagctgccgctccttgtcgatgtagcccgcaaagcggtccgtcggcgcctgcagctgctcctcctcactgctcgttgtagcagccgccaccacgcatccctctggctggttgctcagcgtgtccagcgagtcggtgctcgaggcggcggctgggcgaggcggacacggagctcacggacgtccacgtccacgagtggaagccgctggaggagccagcggccgagcgcgtcccgcctgtgccgctctttggggccagagcgtagtggaggctgccaccgccgtgcaacggcaggaacagggcgcccagcaacgcgtccgcgcttcggaagctcatcatggctggagcaggtgcgcggggccgggccgggacggggcgggacacactgcctctctatcttttaagtggagaatttaatccgtttacatccaaagttattgatatgtcaggctttgttcctgtcatattgttaattgctttttggttcttttatatgttgtttgttcttttctttctcttttattgtttgatgggtttctgtagtggtaccacttgagttttttctttctccattttgtaataacttttccagtgaattttatactttcatgtattttcatgatggtaaatgttgttttttcatttccatttttaggactctcttgagcatttcttgtaggaccagtctagtgctaatgaattccttcagcatttggttgtctgagaaaaactttatttctccttcatttacggaggataattttgccgaatgttgtattcttgtttgacatttttttttcttttagcagtttgcatatatcatcttattatcttctggtctgtacgatttctgctgagaaatctgttagtgtgttgaagtttcctttataggtgatgaaatgcttttctcttgtttttaggattcattctttttctttgacttaagacggtttgactataatacgccatggagaagaccttttgtgttgtattttcctgggaattgctggaagattgagcctcttgtatctaaatgtttaaatatcttgctagacttgggaagtttttgtctattatttaattaaataggttttccaattctttctttctctcttcacccttgggaatactgacaattcaaatatttaataacttcgtgttgtcccaaatgtcataaaggctttgcttattgtttttactcttttttttcctttatttttgtctgactagattatcttaaaagacctatattcgagttctgacattctttcttctgcttgatctagtctattgttggagcattcaaatgtattttgtatttgcatcaataaattcttcagttccagaatttatatttagttattttaagaagtatctatctctttggtaaatttcttatgtttattttgaattgcttttcttatttccttgaattgtttttcagaattctcttgtatcacattgagcttctttaaaatcaatattttgaattctctatatggaattttaaatttctttttgattaagatctattgctggataattattgtgctcctatggaggtgtcatatttccctgcatttttatgttttctgtgtccttacaatcgatatctgcacatctggtgtaacagtcattttttttttttctatttttgatttacttttgtagggagaactttttcctgaagctctatgtatggtgttgagtgggtaggacacattactttgattctgggtgcatacagtagtgtagtctctgcacgatttctttgtctgtagacagtgttagtggaatctgtgatttcctcattgggttacattgtggttattagtgaaggttgtggtaaagttgtgatggagactgagatggcaattgggtcagtcttcaggccacagtcatggcagcagtgagctgagtctgcctctgtgtcccatgatggtgtacactggcacctgtgttggcagttactggtgggctgattctttggcctccaggtggcttacttgaatatcagtagtggcagcagtggatcagatgggtgagtgggttcctgggcccctgggaagctggtgtggcatgggcgatgacaatagcagtactggagcaattttctggggcccaagtggtgtgcatattgatgttggcagtgcttgtaaatggctaggttgaacagtcttcagacccacatgttatgcttgcaggtaagtgccagctaaggtggtagtggctgggagtttagtctcaatttcaggcccatggaaggagtggtcaggtgcccgaggtggtggattaggttgggcaatcacctggactgtgtgctctgtgtcgagagggagaatggcatagtcaggatggatgggcctgtgcttgccactggtgagagagggcactaggcactgtgagtgagggcatggcaatcctttggctccaggtggagtgttccaatgaaggaagtagcagttgcactgaggatatcccactggagaagatggggccagcttcagtggccacagtctgggccagcaggtggacaatacatatccctgcttcatcctagttctgatggggctcgccccacatccctggcagtgttagcgtgtgcctagcttgcactctagccctggctgcaggaggccctgcccagatcgtgaccaagtcccagcagcaactcacacttcacttgtgtcccagtctcaagtcccagcagtacttccttcctggcactggcaaactgcagcctgcacattgctcacttctcagctcgggctgtgggagtactcccagctcatgctgcagtctcagcagtgacaaccccattttcctgagtgcctcagtcccagtgctgctgggccccaggacagtgtgcagaagctaagtttgaaaatgatgacttgctatagtttcttaggtctcagaagagtgtgggactcagtgtgagctccctcgccccacagcaattccatccaatcatctcccagcagcttcttgtgtcagtttcagagattgggagggtggaggttctcttacgtgaccaggattgcatgattgcatggtggggctgtgtgttgctggaagtctctcactcactcttccccacattgggaagttactcccggctcccagccaatcctggccaagcgggctgccttgctttcttctccttcctcacttttggtgttttctgtcacttctctcttgaattccagtgttctgtcttggataatgtattcaaagtgtgactgtgtatacactatttttgttcccctaagtggacaaggaaagcgtgaaattcttctcatcagccatcttgaagtctttcctctgtaagttttagtatttccaatttaaattagagaataaaaggaatgaattattaaagaagttcaaagataactcagatacattagaagggaagaaatagtaaagataaaatcagaaattaattataaagcaaaaaataaaattgataagtaaacccaagagctggattttgaaaatgacagtataataaatcaacttctggcaattataaatgagaaaaagagaaagctagcataaatacttaaaattaggacagaactaaaaggagtcagatagatactgggcagatgatgtagtctaagaaaatatcaaaaacaacttaattctatatatttgaaattttgttagaagcaaatatgaattaccagaaattaacaaagaattagatcaattcagatatctttattgagaaaaacagcctaggaggaaacccactaaatcctcatagtgtatagtaggatttattttggattcagccttaccttgttctatcagttactatgtgaccttggccaggatactcacctctttcagcctcatttccctcatctacaagaagggggaagagttatttcccttacatggtgttttgtgacaatcatattaaatgatgcacgtgaaatgcttagcacagtgctggtccgtcactagtgtacaatacatgatggccatttacattgagcagaaactggaataagttatcaagtactgtgggtccagatggatttatgaatgcattctttcatgcaattttctgcatgtatatgtcattaaaatataatttaaatgtatcccttccaaattttaaggcatagttttcttctaggtgatccaaacacagagaaaatacgatgtttttgcatttggtacacaattataaagatagatgcaacaattctaagtaaaatgatgacaaattaaatccatttgtatattaaaagaatgaaatgccatagcagagtagagtttattttggaaatggtaattgaacatttaatgtgtgataatccgtatattagacacttcataaaaactagattaattagtgatcacagaaccttatgagttatcatcatcatcttatagctaaagaaatgatagctgagtgaggtcagacaagttgataaaggccaaagtaagcactacagctgacattccggtacagtctcacttactctaaagtgtgaaagtactttccattatgtcatcctgaatctgatttaataaactcctaaagttgcatttgataattctcaaccccatcattgatgaaaattcttcaattacttagagtagacacatttttctataatatgttgaaaagtatctgtagtaagcactcaatttcatgcttagtggtgaaatatcagggccattcctaataatttcttttatctctatttaaaaaatttatagatgttctggtcagtgtaataagacatggttcagaaataaatttataataatggaaagaagagacattgtctttatttgcaagtgatacaattatctgtactgcttgccccaaatgatcaactaaaatgataataagatagatatgcaagataatcacatatttaatgaatattgaaaatagcttttatatatgctaacaataccagttagaagagataatggaaacaactcagacctcagattcccattagcaatgcaagtacaaaatactaatttttttttttttttttttttgagactgagtctagctctgtcgccagactggagtgcagtggcgcaatcttggctcactgcaacttccgactccctggttcaagcgattctcctgcctcagcctcccgagtagctgggattacaggcatgtacccccacacccggctaatttttgtatttttagtagagacagggtttcactatgttggccaggctggtttcgatctcctgaccttgtgatccgcccgccttggcctcccaaagtgctggaattacaggtgtgagcaccgtgcccagccaaaatactaactttttaataagaattgtgcagtatatacatggagaagatgacagtgatcaattgggagaaataaataaaaacttgaataaatcagggggctgacacaccattgtactggttaaggacactcatattataaagatgtcatttttcttcaaaattaatttataggtttgacttaattttattctaaattttattcatgagggggtgtcttaagatccagtgaagtgattctagacttcacgtggatgaataaaaaaatgtgtaataggtttttagagaatgggatgggagtaaaaacattcactcaatgtattcattggttctaagattttcaaaaatatgaaattatatgtgttaggatggagcgaatatgataatcaataagtttaaaccttcatgaattcttaaattaagacttctactacagcatatactttcctcccataaaatgcagtaaaatttaactgaataatgcatgtttttcttcagagccttaatgattctataaatacatgactaaagaaatgaataaagtaattggctttttaaaccacgaaacacagctttttagcacttcataagagttattacaagggtgaaaaggaagagaaaaatacaaaagcatgttgagatgtaaatgctggtagttggctgggcttggccaccagttaaatggtccaccccatcttcaatgagcagttgattagaagccatgctttaggacaacggaaacttattgggtccttgccaagttgggttatctacaaagctaagtctgagacaagaactcacatgcaagtgataagttgtagaaaacctctaaggaggtgtagaaacaagtcagggaagtggaaagagacaaagatggctttcaactgaacctaactcccacctcattccacaggaccctcatgttttccttccttgagggaggcaggctggacttttataactctctggcagtcagtcattgactatgggacccccaaagaggcaaaatctcccaagcatctcaggagggagcagctgtgagccattagcagccatgactcacagcagctgggggatgggtgatccagtctataaaatataaaaggagtctgggcagggcactagtggcatttattgcagtcatggtccttgggtatgccttgtggattcatgtcaagaaaatgaataataaagtggtacatgctaaatatataccatagatacagaaaaagagcctaggaggaaacccacgaaaattttgacggtgagtatttcttaatgatggtgattttaattttgttcttattctttaaaatgttgtccatattctgaaaaatatgcgcatgacttaacaccagaaaatagaatagcaacagatctggatagtacatttcagcagatggatcagagttaggatctggctttgctaacttctaacgtgtgggttacttgggctggttacctatcctgtctcagcctcagctttcttatctgtaaaatgggtttgacagatgtgacacataatgttagatattttttgtttgcccagaatctgttccccccttttcctgatgtatcatcccttgcttgtttggaaaactgctcctgccttactccacatgctgctgctgtgctccagctgttcattagaatcacagtaacctccacagtggtgagtgtctaacccagactcacatatgatcagaattttctccagatttttctaatttggagagcaagttctcttttccttgggtcatgagttttatgactgtaaggtaggactgtcagcagctattttgcatgctacctggagaatgtctttctgaatttagcacaacaaagaaagcagcagtaggagtcctggtggccaagcccccactttatggctctgttctgggtcttcaagtctttgcctttgcagccatttttctagcaaagatttttttctttttcttgagctggttttagttgggtttttgtgagttgcaaccaatacagcacaactaatacaaagtctgttgctaggattattgctactgtcatttctgtcatctggaatacccactactcacctgcccatcctgctcctccaccccttagagattgtcctctctttttcactctcatgattttagctcctgatttattgtatgcctcaggttgttagctcataagcatctctgaggttgcctgcataactttaacacatagtaggtgcccacaactgtaaaaatcagaacttgaagggaccttggaaatcatcaagttaaagagaaatagaacgaaagagggaaggagagaaataaatcatcaagtctgtagagtggagatactgaggtccaggctcaagtggcttcttgcctgtgtcagagacatggctagattccatgctcatctcttcagtccactgtgcttgactttttgccctgcttggacactgaataccaagacaaaataaaaaaaacatatcaacagtaggattatttatgtctcagttgagttttagagctggttgacaagagaaaagatgcagaagaatttttctgttgctgctgttgtatgtctattttttacttttagttttctaatttaagccccaatttccttcctaatggtgcaattaaaatcactgaagctccagtggaaactggaacccatctcgttagacaagactgaaaatcaaggagaggcaaaggagagagtcgctgaactgcatgtacctctaacggtgcaagcagaacagcttctacctttgaataaaacccagagatgatgtcctgaggtggtggcagagcctcctgcttgccttccttagccttcaggagctgctctcccagcccataaaacccagatcaactctaaaatatgctgttttcatggagatggtttagtgcttgagatttcttgccagttcggaagcaggaggtcctcaatggggaccaagaggacatctgtccctaccagagtgttgtgttctgaagacagctgaaaccaatgacctccaagccctggaaactccatcatcacttccctatgacctgaaatgttgactcagcacctcggcattaatgatgccttatgctttatttctaaatcatgctttattctggccacaggagggaaactacaaaacgaaaaggtatcaacagacatgtttaagctgcttgggatttgttgcgggaagtaggaaacttgtaaaaggcttatttgaatcctgagaggaaacatgtagtataaagagcacaggctttggaatcaaagcagggatgctggaggtccctcctgtgtgacctcaagcaagttacttaacctctccgaggctgttcttattctattgcagttattctattgtatagagcaataatgttcccaggagtggcatgttctgcaacttaacagttctgaagtgttgaacttgactgcttttagatcctgtccagcatgtttagtggtagtaaagaccatggtgaaaataattgtgctcagccgaaatgagagaactgaaggttgtatagatgatcagggttcatctctccacaggcagcctcccttcagcttttcttctgaagccattgaacagtctcccataccttcccagctcctagttctcctttgatggaaactatagctttcctaacatctgcttcacccctctccttgcttgttctgtgacctattagaatctggctaccaggccaggggctaatgcttgtaatcccaacaatttgcaaggttgagatgggaggattgcttgagcctgggagttcaaggctgcagtgagctatgatcgcactactgcactccagcctgggtgacaaagtgagatctcctgtcttaaaacaaaaaccaaaacaacaaaaacaaaacaatctgcctacctatcatctttaagggtttgcctgtttcttcacccttccctctctctccctttcttaatgcctccctgaggttcaactgtacatttttaacttttaagaaatatttcaaacataatatatatatgtttgtgtacacacacacacacacacacacacacacacacacacacacacaaataagacatctgggtacaagaatcctgcacattttgtttcagaacttgtacatatttacttcagaatgtttatttaaaaaggaagtagaacattgctgacaaagttatcctgctcatcctttccctgcctgttcctactcagaggtcaccagaactctgcagttacttcgtatcatttcttcccctgagcctgtacttctattcatatgtatgagttccttaacagtataaactactgttatttgtgtttcaaaaattttcctgtttattatcctactgtacatatcaattgcaacttcctttttttcctcacccaacattatgttttccagatttatccattttgattcatatgcgctattccttttactttaaatgttgtgtgaataaaccacagtttattctactgagaaatatttaggttgttctacttttctctattatataaattgcagcaataaacactcaatgtatctttttggtcacagctgtgagaatagcttcagtctggacgtctggaagtagaattgctctgttgtgaggcagattgtattagtccattctcatgctgctaataaagacctacccaagactgggtaatttataaaggaaagaggtttaattaactcacagttctgcagggctggggaagcctcaggaaacttacaatcatggcataaggggaagcagacatatccttcttcacatggtgacagcaaggagaagtgcagagtgaaatagggggaaagcccttataaaaccatctgattttgtgagaactctcactatcatgagaacagcatagaagtaactgtcccccatgattcacttatcttccacagggtccctcccatgacacatggagattatgggaactacagttcaagatgaggtttgagtggggacacagccaaaccatatcattccaccccggcccctcccagatcttatgtcctcacatttcaaaacacaatgatgccttcccaacagtctcccaaaatcttaactaattccagcattgactcaaacgtcaaagtccaaagtcttatctgagacaagacaggtcccttccacctatgagcctgtaaaatcaaaagcaagtcagttacttcctagatacaatgggggtacaggcattgggtaaatacacccattccaaatgggagaaattggccaaaacaaagggattgctggtcccatgcaagtccaaaatccaatagggcagtcatttaaccttaaagttacaaaatgatctcctttaattccatgttaaaggtcccatccaagtccaaaatccagtagggcagtcattaaaccttaaagttccaaaatgatcttgtttgactccatgtcccccatccaggtcatgacagtacaagaggtggactcccacagtcttgggcagctccgctcctgtggctttgcaggatacagccccactccaagctgctttcatgggctggcattgagtgtctgtggcttttccaggcacatggtgcaagctgttggtggatctgctggcatctggagggtggtggccttctcacagctccactaggcagtgccccagtggggactcaatgtgggggctccaaccccacatttctcttcggcactgccctagcagaggttctccacgggggctccacccctggagcagacttctacctggacatccaggcaattccatacatcctctgaaatctaggcagagattcccaaacctcaattcttgacttgtgtgcatccacaggcgcagcaccacgtggaagctgccaaagcttggggcttgcaccctctggagctactgtctgagctgtaccttgggaatggctggaatgcagggtaccaagtcctggggctgcacacagcaggggggccctggaccaggcccaggaaatcatttttccctcctaggcctctggtcctgtgattggaggggctgccatgttctctgacatgtcctggagaaattttccccattgtcttggtgattagcatgtggctcctcgttacttatgcaaatttctgctgccagtgaatttatccccagaaaataatgggtttttcttttctactgcatcatcaggatgcaaacttttcaaacttttatgctctgcttcctcttgaatgctttactacttagaaatttcttctgccagataccctaaatcatctccctcaagttcaaagttccacagatctctaggccaggggcaaaatactgccagtctctttgcatagcaagagtgacctttactccagttcccaacaagtcccttatctctatctgagaccacctcagcctggactttattgccattatcactgtcagcattttggtcaaagccattcaacaagtctctaggaaattccaaactttcccacatcttcctgtcttctgagccctccaagtctctaggaagttccaaactttctgacattttcctgtcttcttctgagccttttaaactgtttcaacctctgcttgttacccagttccaaatcacttccacatttttgggtatctttacagcagcaccccactgcttggtaccaatatactgtattagtcttttcttacactggtgttatctatctgtatttttcttattgattctggattctacttatcagttatacacattgcaaatatattctcccaggcttttaactttgttcatagtttctgctttgcatcttgttttctaatttttttttggtggcatttttctttttatcttttttgtaatgattctttttcttaatgatttttatcttaagaatgatttaatctgatattcatagagccatactggctctcttttcttttgcaattgttggaagtatctttttctatgcctttattttcaacctttctgtgaccttgtgttttgggaatatcagttatacgtatcatataactaggttaattttaaaattcagtttgagtctttgagctgttctattttgcctaagaacacttattgtccttactgacatatttgtgtttattattttgggtccttcgatttactgtgctgctttgctttcttgcttcctcccttccctcagtttactacaacatattgtctttctttttttctacttttactaagtatcctgaatttttcccttttttggggttacccttaaaatttcaatatttattattgatattaagactaaaagtaatccgtttttctttatgacacaaagtctcagaaatgctttactctaatcatcctttaatcttgcaaataattattgtttagaatattagtttcacttttcaatgccctcaaattcatcctctccatcatcatcattactatggttacttttaatcattgtttcgttttgcccatgtgtttaccaatttctgtctcactcttgcttcttgaatttcccttctatattttgctataattttttccctcggattgcaccttttgttagttccttcggtagaacatcccactcatgggcattgaaatctgattctaaagtgtctaggacccatgccatagaccctctccttcctggtcagcttggtaccgtctctcttgccacctagtttgtagctcagtcttcagttctgacatctgaagagtctctcctttctttcttttaagctcaactatttattttaaatatttatttgcctcttttatttgtggggagagaggtgtttaatggactcagcaggacagctctagggacatcagacataattttagagttttttatcagaagaaacaggaaatacaaatatgtatagaatgataactccatttcaggtttatagaatatatcagagccttcctcccaatacttatatcactataaaatgtaaactacaaattaccaaatttttaattcttatttttttgactggttgtgaatttatatattgatttattcaatttattttatgttattcaaattacagaacacatgctggctgtgtaaaggaaaagctaattattccctgcattctccaagcttctgcatcccccgccccaccaagataaccagtgttgccagcctgctgaacatttcttcttgcagttctccctgtgagagaaggtatacaaatgcatctccacaaatgcagtagtgtgtttgtttctttagccaaacagaatatgtgacttgctttattcagttaagagtattttattatccagtattcctaagaattgttagcttgacaactgtcagatgatcttcctccatcattttgcagaacccaagtcacccattttctttccatccttatggattctgatcttgaactaactctcccatgtctaacttttccctttggacttgaaccttatccttgtgttctggggtagtcctttatgcatgatccaccaaaacttgagttcaaaagtccacccatacaaacacaggttgagaactgaattagcaataactctcatggaaaaaaatcgaggctggtcacagtagggtcaatgcaaatccacagtgtcactaggctgcaagatgatactaggctgagaaaacataattttgaaaccatgaaagtctagctcaactgtctgattgctgtggctgaagacagacctaggatctattggtccaagaatcagtctaggacaatgatgcttcactttggctgaacatccaaatcatttacaaaactttaaaaaatacagatttctaggcccaatccttatatattttgacaatttgtctggatttggggcccaggtattgtcatgaattgattctaatgcttagcccatgttgagataggataaaacccaggatagcatgctgactcaccatcagaggtagtctctttgggaccatgtgttctcaaactaatcattggagatatctagatttagctatggtatagtgaaaagggcttttgatgtggaattagcagatttggtatctagccacagtttgccacttacttactgtgtgaccttgaacaaatcgttttcctctctgaatctgttttctcatctgtaaacatggagatttatgatctgtgtttcacacagtggttgttaggatcaaaagacaaaatgttcttgcaactatttttttgtaagttgtagggctctttagaaatgttgaataagaggtcttttctaggtctaaggcttgttggttctctaaatagcgattgaccttttctatcatgtaggcctgtgaatccagtggaaaaaatgtgaaatattattctgagtgttttgattttctgaaatgcttccttcaaaaactctccaaggccagtaatttaggccagatttagcagagtaactgaaataatgaaagtaattatccaggtcattctggtccctggattattttccctgagaaatatccaaataatttaatgcaagagaaattctgaattaaaactgtctacattgttgatgtagttcccttcttgcttctaatataagtgaggagtttctaaaagagaatttaggcctttgaatgagggtctatatgaaagggtacaaatgctatgagtaaacttgccttttcaagtggtttagtctcatagtcaaactatttaaatattatgaaagagagtaaaaaacccatgaaaatttaaatatcattctgagaatgctttattttgcagtaccatataatttcaatacgccaaatacattttagagtaacaattatattcttcactcaggcgtaagatcacctgagtttgtggatgtttctcaagaagttgttgtcgtagcatttggacaatgtgattagacaacacccggggagttggtcatttccaaactggaagttgtccagcattattaggaacctcttgactggaagaaaattatcgaacattagtttggtactttctctgttctttttttttttttttttgagatggagtctcgctgtcttgcccaggctggagtgcagtggcacaatcttggttcactgcaagctctgcctcccgggttcatgccattctcctgcgtcagcctctcaagtagctgggactacaggtgcccgccaccatgcccggctaatatatatatattttttatttttagtagagacggggtttcaccgtgttagccaggatgatctcgatctcctgacctcgtgatccgtccgccttggcctcccaaagtgctgggattacaggtgtgagccactgctcccagcattctctgttcttttaaaagtaatttcatcgttggtcctctttagccatgtaaatttcttccgctattcccttaaaaaataaaaatagtagaaatagtgtgtttctcttcttctacaaactgaatcacagttgtaagttgtcctgtgaagataaatggacaaaactatcatttcatccttgtcttaaaagacaatcaggtgtacaacataaaggaatcagtctcctccctcttgccattgtcaacatggtgtctctgaatgaaagagtggcttccaaggagacagttttggccagtgagtttgtgcatggccctcttctttccttagatgatctcgaaggtcatgaaagacctgtagctctttcctctttttatcatccagaaaacatcagaacgaggtttcttctttccacctctatttgtgtatgtgtgatcagccaggaagaaaatgagcattctttgagctactacctgcattgcgttgggagtttgcatagacaatattaatcttcacaaaccttctgtaaggtagatgttgtcatgcccattttaatgatgagggagctgaagtttagagacattgcataacttggctaaagccatgggctgataaccagatgagtgggtatgtatgactctagggccagcgttttgccccttaggtcaaggggaaaagtcaaggagtgtatattttctgagccaaaattcagatgctagagttgcatttggcataaagggtatgagatatttgtaattggggctttcatagcaaagtaggaagttgatgaggtgtgtttcagtgctggcttaacttactattctttgtctttctcagctcaggttgactgggtctaagatgagtctcacctgtaagcacagagcaaatttgattgcaaagatgaatgttagtgggaacatctgagtagcaatgaggcatgcatgctatgacctgttttacctggagactgtgattattatcaacacaaatctgatatcatgttgattacttcattcattcacttaacatttaccaaggatctaccataaatcagataatgttgaagattctggagagagagtgatgaacaagacagaaatctttacatttattgagtacaagacagatgatatgaggataaatagataatacccatcctcaaaggttttacaatcaagttgaaaaatcaaacatattttcagttcacttgattagtaggtaatgaaactaagtgctagaggcacaagtaaatagctaatggagcacagaataggatggtgaaaggccatagttaagttttacagtacaggttcaggaaatgtgttggggctagcatattttaactatgccttaaatcatgggaatggagaaaagagaagtgttcaggactccaccacagaatcttggacacctctaagagtagtttgaagtataatcctaatatatcccagggttccaaatggaccagtcgcccacggtgttacattcccaggaacagtctaggaagcaaaaattgattatgaatatttcaagccaattcctcaaggaaaagagcacgaggagcacaggcaggtttctatgggcaacataagaaggtggctcatattccactggctggaactcagtcatgtggtgttctaggtggggttcttcagaagcaggccttgagatgaggattagtacatgggaattgctcccaggagaagccagcaaagcagcagaactgggaagtggaagagggcaagcatggtgtaatttcaggcaaagtcccagagctggcttgattctgtggggagttctgggagatgaattaggtcccacctcaaggcaaggggtctgggctttcatattctggttaagggctgccccagggcaggggggtacagatgcccagacatgtctggctctctgaaagtacaaggctccattagccaagggcaggcttcaaagtcacaggtaccgccgggcgtggtagctcacgcccgtattctcagcactttgggaggtcgaggcgggtggatcacttgaggtctggagttcaagaccagcctggtcaacatggtgaaaccccgcctctactaaaaaaaaacaaaaaattagccaggtgtggtggtgcgtgcctgtaatcccagctacttgggaggctgagaaaggagaatcgcttgaacccagaggcagaggttgcagtgagccaagattgtgccattgcactccagcctgggtgacagcacgagacattgtctcaaaaaaaaaaaaaaaaaaaaaaaaaggcacagttgcaaacccttggaatcagagcactccaaaacaggaggataggcagacagaaattgaatctagggagaccgagcaaagcacagatagtgtccactccatgtggctacatggaattacaagggaggctggcaaatgtaatctagcagtagcctcaggaagaagagaaaaatgtggatcttggtaaaatacagcagtgccttcctcacctttgtttgtacctgatactcagcccaaatctctttctttttctctgaatacagtaaacacagcacagatgactatttcatcacacttccatgggtgtgcatgggtgtgggggacaggggtgatatgggagtaggaagggtggatgcctccatatattctgagtaaaataaaaattgtacgacttagctcctgtctatagtgatataaacttcaaaaagcattaccatcacttaacgtctttcttttgttctgccatgggaatccccctacctgctaacataatgaccttggagaactttctgggcctgggagtgtgggtccctgggaagggctctggctcccatagccaatgacacaaagcctgagctccttgttctggttcctgctgacctccttggcctcatctcccaccagcctcctctccctctgaacatccagccattcctgagcacatctgactgctcccgtttcaaggacctccttttttctacctggaaagcccactgtcttccttgttggcctgttgaacttctcttctcttaaagcccagctcagaagtcacctccaaacacactttcccaagcttgcatggataacctctctttattttagcaataaaaataataaaatagttactatttagtaaacatatactccgtaccttataaacattatctttcacactaacctggaaaaggaaatgctgttatttgtgtttcacaggtggtggagaggttgggcagtcaaattggatggcagtactctgctcaagagtggcaggctaaaaaatctagaatatgattgtatttattttttagggtatcatcaaaatgaaaatatacaaacatgcatatatgtacaagcatacaaataatacatatgcatctatctatctatctatctatctatctatctatctatctatctatctgtctatctatctcttccttttttcctatctacgtacctacttgagaatttgagaatccccttctgattgagaaataacattcctggcacatcgccttcctctgtcttctgtcaagcccaccatgtctctgtatctgtctttcattgtctttgtgtgtctctctctctgctccttctcttgctcctctaccctatcctttcctcttcccttcctttgtggccccaaagcctgcatgcttcttgttctgcagtgcctgttcaaactcctagcaaggttcaaactcctagcaaggttcaaactcctagcaaggcaggatgtgccatgtgaccctagtttttgcagataaatagcttatttaaatcggaaaccagactctaatcccttctgtgggctgggttgatggatggacgcaattacagtcagttttcttccattagggccctgctggccccaggtactggcagctctctatgggactggttagttatggttggaatagcaatggtaaaggcccaaagtggtggggcttggcagcagacctcagagactgagcactgagacttggcagttgccagggttcaatacattcctgttggagcttgtttggcttggtcccttaccctggggccttgcacctgcagagttgtgcactgtttaggggcttcctgcctatgtgagggtgcccacaggctttgagtgcctttctaatggccaggagtttgagctctggagtcagactgcgtggattcagctcttgggcctctaccaggagacttcccaggtgactttgggcaaagaattcctctctgtgtttcagtttcctcatctataaaatggggacaaaagtaagacctacctcataaggttgttgtgagtgtcaaatgatataattaaggaaaagtacttagcagggtccctggcacatagtaagaactcaagaaatgctaattatgatcatgagtgtcaggtgtattgccttcttcagccctcacaatcagcctgtaaggtagaaattaagtccattttacagtggatgaaacagaggctcaaacatatgaaattacacaggtggagggtcagggagccaggactggagttgaagtatgtaaaccctaagctcaatgcaccttctgctgccctctactgggtgccttctggccaccctactctttgcctcatgatgatgtcagaattgaggcacaacagaattgatgtcacagtcttctttgtccatgaactttttgtttctgcccactgaatacagggtcttaaatcccacagtttttttggagtagattaggcatgttcaggtacatagtcccaaagaggatgatgctgtcataggacagcctggcctggcacttggggcccttgacttctcattctggttctgctactaatgttttatgtaaccttcagaaacccttcccctctctgagactcagtttccctatatggaaaattgccttaccaattccccttctaggtatctgttaattctgtagaaacactcaagctctgggggcacagatgcatgtgctaggagtgttcaatgcaacactgctcataatagtcaaatattggaaacaataattatccaccaaactattgtagcaaataaagacaatgaagggcaactctatgtactggcatgcaaatatgagaaaacatggagagatatattgttgaataccaagagcaagtgacaggactgtatatccagcgtgagtctatttatctaaataaaattatccctgaactctacatatgtataggaatatataggcacatgcattaaaaaaactgtgaaagagacacaacagactattaatgttacttctggggagaagaaagggatggaagtggtggtggttaatggggggggactttgactttcactttttattttatatatctgggtataactttaattttttcttttttgaggtggagtctctctgtgtctcccaggctggagtgcagtggtgcaatctcagctcactgcagcctccacctcccgggttcaaacgattctcctgcctcagcctccaaagtagctgggtttacaggcatgcaccaccacactcagctaatttttgtatttttttttttagtagagacagggtttcaccacatcggccaggctggtctcgaactcctgaccttaggtgatctgcctgcctcagcctcccagagtgctgggattacaggcgtaagccaccacacctggccgtaatgttaatttttatgctattgcattaatatattgcttgttcagtttttttttttttttaagtagcaaattgaagggacaggaccgaaggattgcttcagctttgatgacagcctagatggtcgtggtcctgtgtacaccttcatcttatttctcctcacccagggtcaggaagggtctctgggcagtaaggaggattccaggcctctgctactcatgaccatcttttcagggagccaggctgtccttgactggctgcttcagggcttgggggatgagtcagagggacacaaaagaacaaggggatttctctccagttttcttgacttggccctttgaatctggtagatcaggaactggtctggtcagttgagccctagtggccacgcaggacacagtttgaagtgtcagaccaaatttatttatcttccctagtctcccgcagtttcttctgcttacatttcacagaggactgtaagagcatgagctccaggaaaaaagtacctaaagagaagctcagaggagagtgcagctctattaaccagtgtttctgacgatctaagactgttggattgcagaaaaatcaattgatttctcttttgtttcacttcagtctcttcttcacctaagaaatgattttgttcaagttgttttcaatatcagtatcattgagcctaaaaaggcctcaatggctcattgacttggtcttccagggaggtactcaaatatgaggcacaataattttctaataacaccccaaattagtaaaaaggggaaactgtagcactatattttgtttcatccagttctcagagtatgtttacattggtcctgaaaataattttccttcttgtaggatgtcctgctgtgtaaaagttctttaaggaacacatgggtagaaaaactgagactgatgactacctggcaatcgatttgttaaaggaaaggaggaaagaggtgaaagcatctcaaaagccatggccaggtgtaaattcgtatttgaatttatttcataagtttccaagcctctctccccaagcctattgttttcctctccttctttcttaacagcattcttcttgtgatggttaattttatgtcaacttgattgggctaagagatgcccagattgctggtaaagcgttgtgcctgggtgtgtctgtgagggtgtttctaaagagattagcatttgaagcagtggactcagtaaagatgatccaccctcaccaatatgggtgggcatcctcaaatctgttgagggcctgaatagaacaaaaaggcagagaaggggataatttgctctctctgcttgaactgggacatccatcatctcctgcccttggacagccagtcctcctggttcttaggcctttgggctcagactgaatttcacccccagctttcctgggtctccagtttgtaaatggcaaatcatgggagcttttggcccccataatcaggtgagtaaattctcgtaataagtctccttgtacgtacttctgtctctcatatatgtatgtgtgtgtgtgtatatatatgtgtgtgtgtgtgcgtaggtatgtatgtatatgtatgtatgttgatattggttctgtttctctggcaaaccctaacacacctgccttgtgtaactctcccaccttttcttttgcatttgtctctcttcccttctctttgggtctcttctttaccaaccagattcagcctgtttttctattacttctctcctctctctcagcctcttccctttctttgacctgcataattttctgtcctttcctttcctctaactgaatttgtcataatttgaaaattaaatacatttatatccttgctatattttttaccagtgtatgttatgttttctgtttttaatttaaaggcagaagaaatggagagtttatatttcatcctcttagagttacagagaaaattacaacccaaccaatatcggccctaaactaagatgctttctctatgggactcttgatggatcttttttgaaggggtgaaggaatcaggaaacgttgataaaaggaagttcctataacctttgggaatgttacagttttaattctgattctcactttagattttgattcatttaacaattatattactggcattgcagaaatataagtaagagggaatgtactgacaaatttgggtcttccttctttagcaaccccataactggttctattttattttcagaatatttcagggagaacacaaagacagaaccagatctgtagctgggaaatctaagtgtgaaccctctatcagccctactggttctgtgactctgataagtcaacctctttgaggctcaatttcctcatatgtagaatgaaatcaataaagctactttgcaggcttgtgaggattaaataagaaaagttatgtgaaaatatgtgattaatcctaggggctgaataaatgttagttcattgtctttctttctaggctcttctgagactgatttcctctggatgtgtatgactgtatggggttctggggacttgtggaatcatccttgagaaggggtcaggataaatataagagactaatgaaacagatcatcttgcaaaactcagtttttatgtcacttccttcaggaaggcttccttgacttctcacctcccaagatgagttggctggattctttttgcaccagcagcactctgtccttagtctgactcacttttctatgcctgtcacaggactgtgccatccttatgcatggatgatgtcttatttattcctggatccccagtgcagagcagagtctactgaaagcccacagaaaatatggagtaacccttcattaagctttgaatactttacatctttacatgacctgtctcacttcgactgcataactgtatgaggtcaccaattattacacttattttataaacaaggagactgagtctcacaggggcttagtaacttacccaagatcacacatctggcaattggcagagatcatctttgaacccagacaatctactttcagacctcctgtgcgttgccactatctaatgcagcagaaaaatgaaggaatgaataaataaagaataaacaaatgagccttgtggtgttgaaggagccactcagggcttagtgatataattaacttcattttgaacttggtcatagtgaagatatagcagccttagaaaccaaattcttgacactttcctcctctctaataagagttttgaatagcctgaaatcccttacctgtcttgataaatacaaatacaaagacataaataatgcattagtttctttcccttgcagttgaggctttgcagccataattctgccctacagccagcagacttggagggtggggcaggggagaaaggtgaagtagcgtcttaaacagtctaaaataaattccctaggataattaccaaacagagttaattccataaatttgatttaattggcagcaggcaaatgaaatagggaagaaaaacattctttttttttttttccaagtcattggtggtatctctgaagcagaagttgggaaatcaggataatgtagaaaccagcagcagcccccataaaaacttcacattcaggagagaggaagaaagagactccattactgggcttctcatctgactctgtactcaaagcttatacacatgatccaacataatttgtgtgaccaacttgagaggtagatattattggctatggaatccattagctattgccatgtagcagacaacctcacaactcagtgttttaaaacaatggttttttatgactcacatgtttctggattggctggagcttgacttgttgaagcctaatttttaattggaatagctttgcttctcactgcaagtctgtgagatggctggtatggtctggtctctcttcttctgttctgtcagccaggatattttcatcctgtgttgatggcacttctgttcatatatcattggccaaacaagtcacatggccaataaaaagggcagggaactttactcttgatgaggccatggtgagggagtaggtacaggaaagggagaagaattgaggacaatgatttaataaagcaggcattattacctccgctatgtagacgggggatctgagttcagagaggtggaaaatttgccagatcacgtggctagttgtgtggaggaaagattcaaacccagaattattgggcaccaaacgccatgctttctctcctgatgctgattctgaacgaaaattctatgaattccaacttcaagaggtcattgagatcttccttgacacaaatctatatgcttttgtgtcctagaattaatctctcagatgagtgagaaattgaacaaaatttaaggttcatgtgcctatataattttccatcctttccacttcactcacacattggcctttcctggattcattgcatgcgaaagcgaggtcagctagcaactctgttgtcctttccctcactctgcagaacttatacttacagatctcatcaagtagggctctcccaagatcgcatcctacccaggacaagtatgccttccccaggctcattctaggctctgctgtgggtctggagctgtccagtgtcctgaaacaacccaccacgagatgggtttagtgaatccagctgtaagcaattaaagaacccacgtgtggcaggcctcatttggtttaggcagcttctcttctggcttccttcctcaagtgcacttgggaacatgtattacatggggaactgttagtaactgtaagcaaactctcagggcttaaaagagtgttgctacttgccacgttaacagcaagggattggtgtggcaattcgcagaaactcacaagggaattcagtaagattttcgaaggtgctttgcagtttataaggtccttacacacacacaaaatctgctgtgtgagactgaattgggattcctgtgcttattgtatggataatgaaactgagttgcagaagacacttcctcttccacagtcatagaatggtgcaaaaggaagttacaggactagggagttctgaattatttatctttctccttccatttgtcctgtcaacaaataggattttttttgagacagtctccctctgtcgcccaagctggagtgcagtggtgtgatcgcgactcactgtaatctccacctcccgagtagctgggactacaggcatgcaccaccgtggccagctaatttttgtatttttgtagagatggggtttcgttatgttgcccaggctggtctcaaattcctggcctcaagtgatcctcctgcctaggcctccaaaagtgctgggattacaggtgtgagccaccccacctggcctcaagaaataggatttgattaattgatctatttaaagttctttggggacacaaaaaatatggtcatacccccaaggagattgtaatcacatttgtgagcgtttggtgagggcaaggtgagtacacaaataaggatattggaagatgaaaagtattagctctgagcttcatccatccaatgatctaataaatatatattatatgcctattacattccaggcactatgcttagcactagtaatacaaaagtaaataaagcagatattgccccttcccattctagaaaggaagatagttactaaagaagtaaccaaacaatggagccaacaattactaatttttatgaatgctcttaaatcagtaaatgaataaaatatttagataggataatgaggatgaagggagagtcctacttaggtaaggtggttagaaaagacttctctgaagatgtaacatttaaggtaagatctgaaggctgaaaagtcacctgggtaaagggatgggataagattgtttcaggcagagaaaaagtcctgaggccaaataagattgggatgatggaggaactgcaaatgtgctcacgtgactaaagaacagtgagggagcagggagtgattggaggtgagatcacaaggggagacaggagccagaccatgctgggccttctacgccaccataaagtgtttgtcttctccttttctattatgagtttcttggtagagagcctgggataaagtaggtagtcataacaggatgtcttagattggacactctagaagtagacattggaacaagaaagtgggtgctagtagtttatttgggtagtgattccgggaagcaccagtgcatatgtggggaaaaggaggaataaagcaagccaatacaggtagctcattcagcatgttgctgctgtgggaaatggggctcagtccttcagggaatctctcggagagtgtgtgccacacctgagttattctcactgagaggcaagagagcaggggtgtttatacaccagctgcccttaggctctggtggggggcatgaactctgatacctccagcctgtccagagggccaagcaggcagagttgcaggtgttttcagtgggaagtcaagtctgtgggcatgagaatggggagtgctgaaggatcatcattgggggcacttacaatgtgtgtgtgcacgcgtgtgtgcatgtgcgcacacgggctgagaggagcaaggacaaaggaaggtggagatgccaaagacagttggcataaaggagagtagaaccctgccatctggggacacccttctcagagatggcactggggacagctgaccctggggcttgctggaggccagaggagccatatccctcagggttatgttcctaccttcatgggtgtgagctttgctactcagctcttctcctgggggcatttgacagagtttcctcccctggcaggctaggcagccctcctctctgcttcttttaaacaatctctcttctctggctcagaccctaagatactgtggggccaaagacatcctattctggggatgtcccacgtttgacgcttaacacttttatcccccatcccccagacatatcctttgtttctaagccacaactaggtctggggtggggactaggaagcattcacattctaagggcatctgtgggatgtaggactagatgtgtggtttggagatgcctttctgaaacacatttaaaataagaacttgtgttctccacagagccctgggtaattaatgaggaaagtcatataccacatcccttggtgatataggtaataacacccaacattactgaacttgtttttgtagcttgtgaaaggctagctaataaattatctcatttgttccccacaacaacccaggaaggcaaataatactgttagttccaactaccagatgaaggagctgaggttcagaagtgttcattactttgccccaaacaacacaggcagtgaatgacagagatattctgtgagcatttttcttctggtgatggagtgagcgctttaccttaggaacacttcaacaattttacagtgaacatgacatcccttcacttcagaactatttataacaggggtcttggagatggcctacctatataacagtagggcatcaaatgtcatggagccaataaatccgagggccttgaggtctatgaatacaggtggataagtgtaaggaaagcagcttatataactgttctgaaggttggggtcagaaaactttctcagggaagggctggactttgcaggtcataccatctctgtcacaactactcaactctgctgttgtagtgtgaaaacagccatggatttgttggtgaatgggcatggctgtgttccaataaaactttatttacaaaatcaggcagagggccagatttggcctcatggcagtaatttgtctaaccctgctgtagtgaagactacattacagagattattttactatttctgtcactagatggtgtccttccattagtaaggtgaaatcaaatgctgggctgctttatcatgggtagggaagtggggaagggattgaattatggtggcaggaattagtgtgggaggttgggatcagagaaaagagtttaagtgtaattcaaatgacagaaagtaaacacaacagacacatgcacacacacacacacacacacacacacccattcacgcatccagagtagctactgtgttccaggtacagtgcaaggtggtggtgcacttggtaaatgtttaacaacagactctctgaaaaaaagaaaaggaactcccctcccccctaaattgtagcatttgttgatttctgtagtggaaaactcacatcatgcctgatttcaagctactaacttgctatcaatctgtttgtaacgtacctaccattgaaaaatggagtcttgtaagctgacgtagccagcttcaacacactcctggctcaaggtcttttatttttattgtacctggatatttgtgggacagcaaagttttaaatgcctgggtttcccttaactgtgcttcgtggtgagatcatctaggatctcattcatccagaagtcacttactcagcaacctcagttatctagactatagcttggagccaagaaacaaatactccccatctcctaggcagcacgtgcaaaaatagatgtcattaaattcatgaactctcagtcagcttactcatagaaaaggacctcagttcttcattcagagtgttcttagtcccatattaagtacaatttaaatgagaaaatggttaccaggtttttccacctagaaattagaagcaatgaattagaagggatagtagatccaaatttcataggagcaaattcattgtaagcagcaagaaggatccactgattgctagatagtggagggagaaggtgacaaggctatttcaaagtgggatatttggagctatttggtgtaagcgcaaatagttctccaccttattggatttgagggtattgctgtaactgaccacagtcattctcatgctcatagcaaactcatctgagtcatctgaaaaaattggaatgatgcttaagaaggcagagcattggtcaattcatttcagaaaaatctctcttttacatgcttgatttttttatagttatctttgaaagaagcccatcctgtcgcatggacattgtatagcatgaagaaactcttctcctggtagggtcagatgacaggggcattgctgcaacacctttggtttgttttgattagcagttaagggtgataacgttcagtttaaagtgagcctttttttctcatctgctgtaaaacattctatcctcattctttggttgtgggatttgatgcacactttcatttccaccttctcttctgcctttatgaatttgtagactttgattagggtgcctctcaagctacatcttcacagatggaggcagtttgatttttaaaatctgtttttttcacacaggtcagtccatcagtcatctacttcctgccaccccatcccagctatcatttctcaacactttgaacagttgtcttatcctctctgaagacttctcttaggctcctttccttgcccaaataagttgatgattcattcttctctgcaacatatgtcccttctcatatttttatcattgtttatgatcttttttccttaagtgaaacaaaattcttcaaagaaaaacacagtatctcatgaaggtctttacctctggaatttaggagaccacctgttacttccatatacctgtgtcactgccctcaagaggacctgaggcaggttgactggcaggctccaggtgctgtgcatttgggttgtccatggtgctcaggctaaggccaagtctcccctacattgcttctagttcaagaccaaacatttcaggagaactagagccacaccacttgtgcccagtgtggagctcttccaacagaaactttgtctgggttctctctattggcctggctgatacgatctcagaactgcattgtgatctgagatctttcttccctctttccatccctctctcacaggtgtcacactgcatctgtctgagagttctccccacctgcccttgctccctttgtcatccttaggaatttaccccaataacatcctacatatccaatcccatcctggtgtctgcttctcagagaacccaaactcacacagtatctgatgcataataggtatccagaaatgtcaattgaattgaatttatggtgcttttattggttatcagatcttgtcttcagcagattattttttcagtgtggaggttctgtaattaacaggtgtctaagtctgtttagtgttgctataaaaaaatgtctgaggctgggtaatttataaagaaaaaagtttatttggctcctaattctgatgtttggaaaagtttaacgttgggtatctgcatctgatgagggcctcagggtgcttccactcgtggcagaaggagagccgacctgtgcggacatcccatggtgacagaggaagaaagataaagaagtgaggtgccaggctctttttaatcaccacctctcttgagaaataatagagtgagaaatcagtctgtctcctcacccccagggatagcgttaatctagtcatgagggatccacctccatgacccagacaccttccattaggcttcatctccaacattggggaacaaatttcaacatgaggtttgaaggacacaaacatccagactgtaaccacatggttcatcaaacaacaatagccaatgcctccttaaataagactggactatctacgggtaacttgggatcatcaccatggacatttgttgactatataggaatacacactgatgcccccaggacctgctgaaatgtttaagcctgtttacccctgtatggttggctccagatagatctcattgagttattgtgtctgtttttaattggttttatttttttgtctctgtctttgctgtcaatgtttttaaatgctagatctgagagagacttcaaagatcattcatgagtagatcttcagagcacataatcactaggcactagttagatgctgggaattcagggttagataagaaatggtcctttccttcaaggtgggagcaagttctggctccttattttacagatgtcaaaccaatttggcaagatttctcagcagacccattaagatatgggaaatacaagaagctaatatataatgacagcaaagtatttcttcaagatgggcaggtgtggatccaatctgaacctttattgcaccttctgggccccatgtctcagccagctgatgatggcatagaatcacctgcatacctagccctctgaggcatctcaagatttctgtgactaatcaacatactgaaaaagatgttgctgtgagccaactccatcaacagggacctcatgctgctcatttaattgttgatttacccttatgagagaataagaactgtagtgacttgaaaaagatgccagacattagcttggaggaatatccactttcctgcgtagtgtagagtaatcaggatctgaagacccagtttactcctagctctgttactaattctccatgtgaccttggacagggcatttcacctctttatattttaattatctgcaaaattggataataaatactacattacaaataagagaggatctgtatatgaaggcattttataaacaattcactatataagggtaaggacattaattattaattttattctgccacattctttggtgagatcattcgttcatttattcattcaaaaagcatcttcataaccctatgtatcaggcagttctaagtactttgtaaatcttcgcaacactgtgagatgtgtacactattatcacaattttatagatgaagaaagtccaaataagttaaataacttgcccaatgtcacacatctagtaaatggcagacctggaattctaacccatgcaatctggctccataattcatgccattggcgactacaccaaaggacagaatgcctttttttaaactggaatttgactcagtgaaataggcctggaaaaagagagagagagagaaggaaaaagaagagacatgggctcaaaagagaaagggatggggagtgataggatatccataggaaggaccacaaggtagaaggagagcactctggccaggaaagtgatggtcatcccaaaacatacatggtctttcttcaagaagatggttcctccattcaatgtcctggaagagaagagacagagagagctcttgggcgaacaaacttatttcaaggagagacactgataatcaaaagagatcattgttttccatgatgtttagcaagtcacagatccccatgttgatccaggctcctggagagctgctcaacaagcagaaaaggggaaaggccactcatttcttattaatcatgagattccttattgatcatgagaactaactgaatagtgggcaaactttaacattgcttccagtgatcccagcctcctagtaggtacacctttgtgtaatcccctccttttaagtgtgggctggccttgcagactctctctaatgaatgtcattagtgatggatgccacttctaagattaggttataaaaggcaatgccttctctctatctctcttgctcttgctctctctccttctctctctctctctctccctctcatctcactggtgttgagtaaagcaagctgccatgttgtgagcaatcctacacccccagagaatggtgaggaactgagtatttcagtgctgcagtccataaggaaatgaacctgtgaacaaccatatgaatgagcttggatgtagagcctttagctccagttgagacttgagaagagggtagatctcactgactccatgactataatctcaagaaagacctttagccagaagcatccaactaggttgctcgcagatccctgacccactagactagaacatgtgatgtatgtgtggttagggcagaggtgagaccggataagtgaacaactatcagatgggctaggatgttttgactagaaagtcaagattttccatatggaatcactctgcagacattttggtgggttatctgagtgaggaaatataggaaggcgaagagtctgaaacatccttggaatttcgaatcctttaagtctataaattcggcaacattcactgcaattgatttccaggctagagttctctctgcctcaggggttttaattttattcttctaataattctttattgtcattaatattataataaaacatgatgcatatagcttattgcatgattaaggggcttactgaagacttactggacactgtgctccacccacagtctcaggatctggagggttctttgtggagctgccatacttcatgtcatggatgtggaaaatggagtctgaggtggatcctccctctcattctcacagcctgtaaaaggctcctaccccacttgtagcctacagagggttatgatgcatggttaagagggaaggttctaaagtcagagaggcctgggctgatagtctggtgctcaaaagtatctgtgtgagcttggataaattacttaacctctctgagttcatttttttcagctataaaacagggatgggaagggtgccaacatcacaaggcatggtatgaattaaatgagatgatttgcatggggggatctggcacaggtgtacttgccagaaatattggttactattttttgtgatgccacagaatgccattttctactcaaattcattttttcttacctttctctgttgctgactatagaatggttttatgtatgaattatgaataagtcctaattatggtcccagagccctgtcagtactaatccataacagatacgtatgtctacatgttattaattaatatatcaggtatactagttttctgttgcgcatactgacttaccccgaaatttagcagcttaaaataacacacctttaatgccttgcagtttctgtgggtctggaatctgagcacaacttagctgggtctttgcttcagggcctctgcaaggttgaaatcaaggtgttgaatgagactgcagtctcacctgaaggatcaactggagaaatgatccacttccaagctcacgtggtggctggcagcattcatttctttgaaggctgttggactgagggcctcagttccctgctggatgttgaggagatgccatcctcagttcctgaccattgtggacatctccagcttgcttcatcagagcaaacacacaggagtcagagtgaaagggagagagggagagaggaggaaagagggagaaggggagagggagactattagggttcactaaggataaaagttcacagcccaatggacactcactcctgtgtcatggtccatgctttcctttgctgtcctaatacctaaagattgagtctcaggccagaggctgtggacctcactgttacaaggatcctcatgtagggttccttccagggtaatgcacagagatcttccagggagtgagaccatcttagcaccttcctgggggttaagcacaatgacctgctgctctcacccccagttatgtgtgtggtgtgtgtgttaacagaaaggattaacttaggtagtttaaatggttttatcctggattactggatgattttttgttatgctgacacattctgtgagaagtataaattatttgaaaaggtgacatctggtttgcttctactcattgtgttaaaaaaagtggagtgaatgtaatgaggttcaatgtgggtcttaaacccttctgaggcttaacagtgaacattctctccatgcagaatcctagcccagtcagagctctaggaccctgggttggggagtctcagtctggctcagggttaggggttcactgaggggtagtgaccctgtgttttaaaaccaggtttggagattaggcataattcccactatccagatattacattaagcacccagttcaaaaacatctctcaggaagcccatgtccgtctgggacatgggagatctgctaagtccacattcaaattttcattcatcatttccccctagttcccactgacctctcaggtatgtttttcacctgatcatcaggtctcagtccctggatgtttacataatttatttttcctaatttgcatgacagccaagagagattatatattgcagaactgaggtctataaagacgaagtgacttaggtagcaagaagctgagacagggctggaattcacactccaaattctaggctgtttacaaaatataatgtagctccataccagctcccaagagccagaactcctggtcagtcttaccatgggaaaggtagcatcaatatctaacatttctggcaatgactctgatatagaagctcacagagaccctcagcctagagaccttggagcatcccaacagcccagctattggctatccaccactcaggctttcagtttatcagtcctgtctctgacacagcccccatcccacaatccccaagcagatgcttgctgcagcactgagcacataattatgattgccactttcctctggtcagtaagttcttccaggatagaagttgggtactattgctagcacctggcagagtgcctggtacaaaataggcactcagtaaaaattgatagtgctcgggtagactgtggtcatttctggcaggagctcccagaatgggttgtttttatgcatcccttaaactagaatgatgccctcagtgccacagctcatcatagcactgaatgcactagattgcaatggggagttcattcatttatctgtgtttttgttccatctaaagtagaccttgagacaagggtttgggtgtaagtagtttctttgggagaagataacaggacaaactatgactaggtaggggaagtgtgacaagtaagggaggagcaatagctgtgggcaattggagctcagtccgactgtagccttctgagtggtggtgttgaacattctttagattactccactggggtgaggaatctagaaaatttatccaccaactcccatccctcagtaattgaggcttgttcctgggctgctaactccccagcattgtcctgtggccattggtgcatacagaaactgtccccagaagacttctgagttaggacaagtggacacaacatcagggcaccggtcacatctgctcatttcatttaggcagcaaggtctttagtaaaatgtatagctagagtttattgagaaattgctgtgtgccagccacacgtatactcttacatagttttcacaaccatgaggttactattttcagccccattttatggatggggaaactgaggctcagtgaagctacctaacttgtccaggctggtaagtagcagagctcaatattctccctgggtgtgtctgattccacagttggtgcccattctactttattgcacctccagcagtgcttagcaaataagataatgattgggtttaaaagtcaggaactgcaggaatcccgaagagcacttaaaagtccagcattagaggatgaaggcctgagataaacacaggctgagtaaaaatttaaagggaagaaagtgagagagtagaaagtccaagtggctggttcagccagagaggccacagtcagagccaggcataagtattgcaggtgaggagacccagggagtactcagcttgtgacaaggagagcagaggacaaacctatacctccaggcacatccagaagcaccttgcatatcagcagaaagaagttgttgtttcttaagtccatcaaatggaagaggcaataaagaatcagtgggactccaagattgaataactcattttggtgtagttaagaatcaccaaacatgtgatcactcatttgtgatagcatgccagagctgaagcaaccctccctcagaggaccaggtcctcatcatggccagaagaaacgtcttctccatggccatgcagcagaagcaaacaggcatcccacttctcacacatggatcaattgttactacttacaaatggactcttggaatctccaagtaaactgtgcaaagtgggtcaagtaaattcctccccgtaccctagcctcatcacttttgtctgtagacagaaacaatgatgctgtgtggcagtgagggttaaaggaggtcataggtgtgaacctgctgctgacagcccatcctgtggttggtgcagagctcacatggaagttccctctaggcccttccccacctggtctgcagggaacagtgagctcagagccaacactgtagggaggggtacaggggaccctataacactttcacctccaccaaaaggagaggcctctcatttaagatcccctttcctgctctgtgcaaactatggtctgaccacacttagacatggacatgaagcatcacccctggtttgtgagcaacacccagtggcacccgaggggctagacaagggcaggaggggaaaactgacatttcagtaatgacagtcgtttctactgggaaagtccagctgagagaggaaatgcatgcactgtggacctcagaggagtttctcaggattcagttcttccatcctcacctgtgaaatgtgccggtggttgagatggctaaacgttctgattttgccattttgtgatgtgaagatagataactgaaggacactgaagacacatttggcaaactcttccctgctatctggagctgcttgttggaggaaggttgagatgagcgtttatggtttgcttcagctcctctgctgtgcaccaggcctgatgctaggtggggtgtaggaggcacagctgctgctttccaggaggggacagtggctgccagcaatagcaggtaacatttatggagcactcactttatgccagactatgcattagctagctgtatcatcaccacaccctacagggtagattctattcttactctcctttaagagttagtagcttctctcacatcacacaactaagcccacctttttacaccttacagaataatattccacttgacattcaaggagtgccttttgtgtgccaggcactgtgacaggtgagttataaatgtgctctgctttaatccgcccagcaacttggaaggtagacattattttataaataaggagatcggctcagagaggtaaagtggctccctcaaggtgacacagctcatgtgtggagaacctagagtgtaatataagtcactcttacaagtatacgagaaggaaacaagcccaagttataccccagactgttaagacttccaagagaagtgttaggcatgatgtagaaatgcacgagtgagtccaacttgggggatgtgggaggcaattgtggagaagttggtgtctgagcagggcctggaaggatgagcagagtggactagggaaggaagggcatctgtgtggggacacaaagtgcttatggtttgcttcatggtgatggtgggcttatggttagactatctggatgcagtccctggttctataactttgtagttgtgtgacattagacatgctactcttttcccacccttaaaaggagagtaagaatagagtctaccctgtagggtgtggtgatgatatagtgagctaacacatgcatggagacaagccagcagttagtaggctcagaaggtagcaagagagtgggagccaggtgagtaggctaaggtaaaatgtggagaatctcgggttccaggaggggaaccagaccttgtgctgcatcagcagagactgctggatggtggactactgggtggagaggagagagggagtcaccagtgggcattattaggaaggcacttcccacagatatctgaatgtacaaaagttcttccagcccaaacttctccccgatacttcctattcttgcttcttcaccccagataccaaattttgccatgttggtgggttgcaggagcggggttgtggagtttctaattgcagagatttggtttgtctgggattgatctgtctagtggtttcctttgcttctcagagcacagtttcagggagactacttgtggatccagttacatgcaaagtgctttcttcttttgtccccatttaaaaaattaatttattttaaaaatgtttattttaattgacaagtaaaaattgtatatatttatggtagatcacatagtgttttgatatatgcatatgtggtaaaatggctaaataaagctgattaacatatgcattagttcacatacctatttttggcaaaaaacccattctgttagcaattttcaaatatacaatatgttattagctgtagtctccatgatgcacaatagatttcttgcacttactcctcctatgtaactaaaatgttgtgacctttgactgacatctcctcagtcctcccactccctgcccccagcctctggtaaccaccattttattccctatttctatgagctcaactattttacatcctaaatataagtgagatcatgcagtattcatctttctgtgcctggcttacttaacataatgtccttcaggttcatctatgttatttcaaatgatgagatttccttcttttttaaggctcaacaatattctgttgtgtatatatatagtaatgtatattccatatattccaacagtattgttggaatgtatttatgtatatatatatacccatatatattccaaggtattttccgtatattccaacaatattccattgtgtatatatacacaatgtttattcattgatggacacagtttgatttcatatcttggctattgtaaatagtgctgcaataaacatggaagtgcagatatctctttgacatactgatttcatttcctttggatatatatccagtagtgggattgctggatcatacggtagttctacttctaattttttgaggaaccaccatactgttttccacgattattgtgctaatttatattcccaccaacagtgtgcaaaagttcccttttttttccccacagtctcaccaacattttttatctcttgtcttgttgctaatatccattctaacaggtgtgatatctccttgtggttgtaagtggcattttcctgataattagtgcacagtgcttcattcttaaaggggatgatgccacagagttgccttccaacctagccatggagacaggagaaacaggctgtctgagcaggttcagcctccattccttactggaggggccacaccgggaggagaaggaggttagattgctagagtctttttcagtcagggtgggctagcttggggtctgtttaactggacttgtttaaagttgaacaaagtctaagagacttggctttctctggggttcctggtatatattgatcatgatagagagataccttgtgagatgactgtggaggattaaccttctctaaaggtgctcctaggaaggcccatctactttccctcaccatccagataggaattccatcaggaatagctttgtggttcaccatgagatgtcaccaagatattttaagaaatgagtgcaaaacagtgtaaattgagagctcagtttcttagcagtaacatgtatttagtgtgtttggaaggaaaacagcctaaattatggaaaagtgtgatgatcaagatctgacataaatacatcaacaaagactaaatgtagacacagacatcagaaatgcctttctcacatgctgcaggggtgtctcctttgcctggcagagctttagaaacacatcatgtgccttcagggggtgttatcttggctgtggtgcaggcaaagcctaagctgctctgatctttgggcctggagtcacctggaggaaggattttcagtatcatattccagattctgtacaaaggttttctgtctgacactagagggtttttggctgatgtgatgctgcagatttggtcagccttttggtgttggttcttgtgtttctgcgtgtgctcacataggactcctagcttctagtactgaaccttagttctgttcgcatctttttgtgacctctgttgatctgggagcagctttccttctttaaccaaggctctgctgtccatagattgctggtgctgaataagtccaatccactactgccctcgatgctcccgttttggggttctctctccggccctgtgactttctgagtataaactatgcttggtcttgttcataacaatctctaaagattgattgatttttgtgagctgccaaagagaagtgcctggaatagcaattgttactgtgaaacagggctgagaggctggaatggtgagcatttctgccacctgggggaggtcgcagggaatatatttaagttgcaattttctccacctcctagaaactcctcagttcttgggttggtttttcctttcttttcttttaatatctcttgtctagacatccaggagcctagtgatacattacattgttcagccccttaacatttatttcataaagcacttttacgtatattaaaaggaaacagttcagaacatagactttgaaggcatgctgcctaaatccccatgatggctttccattgcaggctgtgcaaccttgagcaactccctctttctgcgctcaatgttctcgtataatgggggcaataatatacctactttataaattgtggggatagataaattaatatttgtaaagtgattagaacaagacttgcatgtagtagtcctacataaatgttctttactattataattatcattattattgctactacatttattgtcatggccaactgtttagggtagtggcataatcgaaattacctttgattctagctccttccttcctatgccctagcttcaatccctattaaataaattcaccctgccctaagtatttggggagcttcctgatgctgtctctcctgcatttagtgtcaagcctcataggcctactcatctgctggtgatcactgtcacttgtactcctgccaagcactggtactgccccatggcttcatccagctattactgacttttcctctgttcacccaggtccagcagttcttcagagatcatttgaaaggcccagagcctctaagttgtggagtgacccagagtggagcagggagaatggctcactgccctttggtttacatttttcacaaaggactcagccctcctgcaaagaaaattcactctgccaagcattagtgagcaatagagattttcctggagattaggcccaaacgatggttttattgcataccatgcagcaaaacacctaataaattaaacacttctttagcctgccaggatgcttttgccagtcacctgtccctcagacatttctaagccatggtgctctttcctctcctcttttaaaaataattcagaataatttctatctttgacctctgttggtctgggagcagctttccctctttaaccaaggctctgctgtccacagattgctggtgcatattcttttgcataatgtttggactcctgcttacttcagccctcaaagtgctcatctgagccgctctttggcacacatagtacctccctcatatcagttgctgagaagtcaaatgtttcttcatatgttacacaaaaataaggctactgcccttttgggtcactgtttcactcactcactcaccagccttatagccagttagtgttttcagatctactcaattttgaattattttccaacttgcgaaagctcatgtttcagaatttgctctagtcaggaccacagtcttcctgacttgcaggaatgtgtgtagtgtggtattggatccctccatggggatgggcaccccaacacagctgtagctggcagcctggccttcccttgtaagaccagcccatccaggtatgtgctttcaggaagtaaatcaaacatcaccgctttttagagagactgatgtgtgccctcagagagcacacaggagtcagaatatgcatggcactggcagtggccaagttcttgggtggaaatggcctgtttggccaaatccaggcactagataattgttttccagagtgtggtccacagaacacttgcatcacctggggaatgtacaaaacatatatatttcaaagctttcccaagacttttccaatcagcctgtggaggtaggggtgaagaatctgtatttttaaacaaagcccttagctagttcttccacatcctaaaatttgggaaccactgccctagactgtaagttccattaaggcagggacttgaattctatccctcaagtaaacaatgttgggtcccttctttctcctgatggatatataggaagagtctatttcccaattcccttgcaattatgtgagacacgcaatcatttccagctaatgggctgtatgcaaaaataaagcatattacttctgggccaaagtatagagatgaggggtgagttctccggttctcactttacctttctgtgatgactcatgaggtcacatattccagatggtacagctacaaggtagtggagcctctgtcatcctggcttcttgagtgactgtgtggagcagagtccccttgcagagccgctgtggacatggaacatgagtgagaaataaacatctgctctgttaagccactaaaatttcaggattaatttgctatcacagcataacccagctttatctttaccaatatacaagacacttttatcatcttacagtgatgttggacaatcgatttgtttattattaaaaagtttaatgagatttgctttaagcttcagcaacagttgctggagaaacaatatctgactgcagtgggcagggctgggactagagtgagacaagtgagagacgtaaaaggcccaaactattcatctcagcattgctctcgagagctcctgctttgtaaaggaacaagtaaaaatgatttgtaatctcactcctccttcaggcaacaaagactcactgagaccagcatgccagagctcagcactgggacagaggagtaaataggcattgtcctggtcctcaaggaagtcacagtcaaatgagaaaccagacagataaggacaacatggggtggttgtttcccagaaggaggggtaagccaagggcttagcagcccagatgaagcagaggcctcctccagttggactctgtgggcagctcagctcccttgacaatgactgttgagaaaatgccagccacgcagtgccttgtgctggtgtttggagaagagttgtgtgctggtaattgatggtgtgtacttgttcagatgtcccaaatagctgatgatttgattatgaggactttacaaccactcaggcccaggctcattctggttttccaaagaagatgattccagacacacaccaatcgagaggactcatgctaggcattgggcatagagcctggcacaaggcctggtcacaggaattgcccagtaaagggcagttcttctctgtcctccatgtctgttggccagagttaagtcatgggagtggtcacaaagagggaggaggcaggaaaccttattaataaagaagttgatggcatttataagtaaaataatgttaagtgaatatctgtgatttgctgggcatgagtctaagtactttatctgtaagaactcacttaatcctcagaagaaacccaatgagagaggtattcgctttcgtctcccactgctgctgtgataagccatcacaaacttggtgacttaaagcaacacagactgattacattacaattctggaggtcagagatctgacatgaaactaactgggctagaattttaaggtgttggaagtgctgtcttcctttgtggaaactctagggaagaatccatttcctggcctttttcccacttctaaaggccgcctgcatttcttggcttattgccccttctgccttcaaagctagcagtgtcacctgagtcgtccttacactaccatctctggttctcttctgtctctctcatctctgtttgaagatgcttttgactatgttaggtctacctggattatccaggataatctatttacctcaaggtcagctgattagcaaccttaattccatctgcaactttaattttcttttgccatgtaacctaacatattcacaggttccagggattaggacatagacacctttgggaggggattattctacctaccagagagagtactgttaataaaggaggtactattaaaggaggaccaagaccatcacagtgattgcaagagtcagcactgaatttactaatttaacaaccaagggaagataacttggggaagaaatacactgagtggctccctgaagggaaaatgtcagtgagttttacgtgcaggcaagaaagtttcgttgtgattatgctaattaagaatcgaagtttgcatcctagattagacaaaataaatcaattgatccatacattaaaatgtctttttatattcaccaagcgagaggcttcaggttggtctagggaagatctggtgtcctgaggtcactccaagtccgtagatgtttatctgcttcagttggttagtattgccagtgtggtaaaactcagcattcagtgcctgtacaagtggaaagtccttttttttttcttttaaacagtactattattgttcccagtttacagatgaggaaactgagacttacagacaccacataacttgaagatagtaaagccaggattcatacctgaacaactgaggccaagtctccctttctcctttttttcccaaagcaaatgtagtttctttatttctctataaatcatcagctgaccctcacaatttagttgaatccagaaacataattcaaggtagtcattgaaatcatccctctagttacatgctcagtctattttagcaatacactaagtctctcagatttttttcttacaatatttacccctcaactactctcccaaggctatgtctaaaggggcaggggttggtgggggaggtttcccttgacctcatggaggtgaggaagtgggcaagtgccctggagtcatgtcctccgcctctgcgttggtctggtctgtatagttgctggactggccttttcctggggctgggagcacccaaggtccattagggtcttagtgcccatgatcacagctcttgaaagcctctgtaccccgagcctgcaagtctcctttcttaatcgctttattcaaggactcaagactccaggtgttgccgacactcttctcctgaacccacccaatctaagaggctgcaagtggagaattcaacaatggcacttcctgggggttgagaggctcagatggaaaaatcaatgcttatctctgccaggagttttgggaaaatgcatttcttgagtgaatggggacatttgcagatgaaattcaccaaccatcaggcagccagtgcctcttgcagcagaaaacatgatcagcttctgacattaaccccagggcaggaaggagcagctcattaagctctggcagggatgctgacagccacagacgtgagaccatgtttataaacgacttacagtggggaccagtgacacctcattataggcgcccatcaagggcctgttcttccctctttatctccctctatcaatcttccagtgcagagtctgtaattaggacctgtattgactcttgatcaatttgtttagttaggccgaggaagaacactgctggttacgtgtacacattgaaaaggttgtcatgtgagtgtgtgtgtgtgtgtgtctgtgtctgtgtgttgtagggggcacggagggagggacacaggattcctggctctgcctgtagccacagaagtacgcctgagggattcagtttctctctgatgtggttcctcatgtctttgggggctgccatgacagctggcacccagccctccctgagatgatttgggatgcctgatactttcactgtgttacatagaattgctccctgtgagttgggttctgcactgtgccatgtggattaattcttgcataggccctgacaaacttctccaatgaggaaatgaaaacttagtgtggacaagtaacttgttgggggttaaggtaaccccacaactttgtgaggttgccttaaacacgtaatgtcaatcagaccagaagtgggacaagatctttggtacagcctattgggtgatactgatgcatctacaaacacactgtcattaattgggggtgaggtaggagatagctaggctcagccccaatcctagcaaataggaaaccttgtttagcaaataggctaaattggttgaggacctatactacccctgggggattgctgcctgggctgtcagacagcttggcaagtgacaagaccctcttcctttgaagacaggccaccagaccctcttcattcagcttgttacacattctggtcccatagccagttccacttgcactgagctcatggtcacatgagaatcatatcgtgatgaattggccttccatgcagattctctgtggatagataatggttgattttgcatttctcatacctgaatttaaatactggcattcaggtatattcattagcttcttgtaagcttggtaaatgtgagtctagtccagtaggatggctgtaccctttagttctggacaagcacaaaatcctgaaacttggggctgtgactaagcggctatgcttgatgggttcttctgggagatttgtcagtcacattttctgggagacactgggcccttgtgaccccataaacccatggctattacctttttgtattgaaggaggcaggacttcatattttatttgctgactctgtatttgatactcttcccagtgcccaatatcatcttcctagtcttggtctcccaatgcagacatctggtagcctaggctctgctctggaaaatatggagtgggtttgaagggtgagggttgaggggatgaatatttcaagattctcctgacttggcgctggagaggaaaacaacagaattgggctttctgggtcactccctgggtttcataggttgaatttcagagtttcaactgatggccagctcctctctgcaaagagcagctcaggggctagtcacactctgaaggaagttgagaaaaggccaaggatgaatccctgaccagtagagttcataataaaactcatgcatgatgtttttcatatgggaaactcagttcttcctgagtatggggaaaggtcccagatgcaggctcagaagctggctctgttgttgtatatgttttaaaacatgcctgcatattctctggtgctcctcccaatgagaggtgggctctgtgtttcttctcttggaatctgggttgtccttagtgactaggtgaccaacagagtaggacggaagtgatgccatgtggcttccaaagcttggtcataagaggtgataaagcttcctcttggttcttttggggcactcacattttgtgctctgagccactatataagaatgctacggctgccacgtcgtgggagctcaggacacatggagagtctgcatgtaggtgttccggcccactgtccccagtgtgttccctactgacagccagcatcaacctacagacatgtgagcaagaatgcctctagatgattttggcccctagccattaagtcctcccagtcatccagtcttcccagctaaaacctcaggcatgaaggggtatgacaagtcatcttccctctgacctgtattaattgctgactcagggacactcacattttgagcctaataaaatactactaagttttttttgttttgttttgttttgtttttgagatgcactttcgctcttattgcccaggctggagtgcagtggcgcaatctcggctcactgcaacctctgcctcccgggttcaagcaattctcctgcctcagcctcccaagtagctgggattacagatgcccgccaccacacctgtctaattttttgtatttagtagagatggggtttcaccatgttggtcagctggtctccaactcctgatctcaggtggtccgccttcatcagcctcccaaagtgctgggattagaggcgcataccactgccactaagttttaggtgagtttgttacttagcgaagtataactggaatagccactagccctgtggctttgaattggacctttaactcctttgactcaaatgtgagacaatgacgtccactaacagggtatatatgtgacaatgcacatcgaagctgctggcatgcagtaggtgctcagcaaatcatggtttcttactcttccagaaggcccttcacatgtctcttggcctccccttaggggaatattggtctggactgccaagtcaaaaggaaagtgctacatgggctccactgcctgtttctaattaaaatcataaaaaccttctgtgaacaccttaatagtgtctgctaggctgaaggcaagtttcatgaatagattccttaaagggaacctggaactactcctataaaatgcaactttgaaagaaaccaacctccagggcctaactgcaaccacagaaacaaaaataaccaaattccctcattccccagggcagtagctctcaaagtatgctctgaatctcttggggagcttactgaaaatgctgattgctaggcaccaccatgcagtgagcttgttgtggggctggggtacagaaatcctcaattttcagaagcacccccatctcattgagttctgagactctccacttgggctttcagagctcaagggaaacttcgagataaagtggctgatctcaccatacagaaaggaaagaaccgagatggctccaagaggggctgagatcagcatccctctgcaagttgaggggaggcaagagcagagctcaggctgatgctccccatatagtgctccctcctatccccccaccatcctgcagatattcagcctcattcattacagccacatggaatggctctgagcataccatcagcatacctagcagacattctgatttttcccagggctcttccacaaatatttcggagaactccagggatgcttgcatgcacagcttggatatttggcttcttctcactaccaatttggggatctcagtgatgttcctttttcattgctggacttagcaagtgccttgtgagtgggagggaaatctcccctttcgtggtctccgtaggatgcagtttcctgcctgtaagcagaactatttcctgggatccttctgcttgtctgaggcgtttggtctcttccaaaggattggtagcatttacaaatgcatactcttgcctagacactgttttaagttctttacagagatacccccattttcagatttaagaactgagggccagaaatattaagtaacttgcccaaggtcacacagcttgtaaggggcagagcctggctttgaactcaggaaatctagctctgagtctctgctctgagccgctctgttccagtgagtactgagcccctgcatgctgtgtgtcgggctgtctcccacaatggaccatgtattggcctcatgaaactcattcctgtatccctaatagtaaagagagtgcctgacacatagcagcctggtgaatattccttgtgaaggaatatgtctatttttaggtatgaatggaagtgaagctttaactccacaaggaaacttttaggtgcggccacagggatactgaccagaacaggagaagaggtcctgaatcacggaggcgggtgaggagtgaagttggaggctgactcggtagcctagaggggagcagctgaggctgctgtgcccatgattcagtcactgtgcccctgagagggacccactggctattactgacatgtcaaaagcagggccaggagctgtgggttatccaaaaacacaaatttatgaaaatagccctccctattgagaaacattggctcaactaggcagagaaaagctctgcatcagtgccacctggtgagaactaaatgggagaaagatagctcatgtagctgctgtaaatgtattacccaggaatggcttggagattatttacaagatgctgagagatgcactgatcctatttcagcagcaccatggagaccagcagactggcttgggcccacggtttgggtctttgcttttcactcactttggccagaggaccaaaagtggtcatcgcctggattcttcctcaaagccctgaaaacagcagtgtgtcagtgtgtcagtggatttgctttggaggtctctatgagacagaagggtagagaggaggatgcattcccactgtcttagttgggtttctgcaggagtaactctgagacaaggaattgggtgcaatggcttatttgcgtggtgaccccaggaagctctacagaaaaatggggaagtgaggcaaggagggaaaagaattgtgagagttcgctcctgctttgttttgaagggtctagtcttcagctaacaattgccctaacttccttcagaggattattgagatgacagacaactgcaaaacctaggcaggtcccccagtgagggtgaactgagggatgaacgacaggctgagaccagcagtcagagtggttgtcagacccccatggggaccagtggtaaaactacttctaattttggggaacaagggggagagaggcaagagacgaagttcctctaaatactgagataatattctcaatcaccatctacgtcaatcattggtgcatgtgtacaaataaaaattaaaatatgtcttcatacatccgactgaagtcacagttatccctgggagtagtgcaacgtcgcagacagctgttctcaagtctgagtgaccttgtgtcttctgtttttgagcgtccacattttccaaacttcctggcacaagcaatttccagacaaaactcccagattgtttagctcctgatgaacctgtttgatctggaatttcctcgagacctggctctatttgccagctgaacagattatactgattgatgtgtttgtgtgggtttcaaatcatttctaagtaacgcaaatctgcttagactcccggtgctgactgcagtttgcttccggacatctggggtggcataccctgttgggcacggaaggacaagtggaagccagacttggcacagacagaccaggcctggcaatgggagcaccccagggcacacatctatgcagcaaggcactctgggacccagaagacctggagacccttgtgctctgagggcactctgctgggccctgcctgcttctgagcacagggcagatggcagactcacatgagacctattttcccaggccccagagtgtggctgataaggcaggtagctgcagccacagccagtctgggtggtctctttccctctcagacaccctgtgggtcccagtgatgtcacaagttcaattatgtacctgcttatgtttgtgttttgaagcatttggagctttgaagagtggcccccccacaccccgcatacttccctgtctcccctcccataccattttttttagatcatcaggtaagccttcagcagaggggcagtggcatgaacatttgaaaaagaaggagcagaactcatctctgtgtatgccgttggtatccacctcaccaggagtagggttgagaacaggagcttgggttctcagttgggccccaacctcacctcagtctcaggtgctcaccttgcagatgcccaccatccccacctggcagtgccatttatatttccaaagcaatctctgattagggtgagtccagggctcctgcaggctggagctcccttgctttcctcttacacagtggtcaggaataaagtgctcttccctcctgaaaagatgaggcccgtgtcggtggctttcatcccagctacttgtagaactcataaattagagcagcaattggctaactttttctgtaaaaagccagatagtaagtattttaggcttttcgagtcatagggtctctgttgcaatgcgtcaactctgccatagacaatttgtaacttaatagatgtggctgtgttccaatacattattatttataaaaataagtggcacgctgggtgtggctctccaactgtagtttgctaaaggctgaattagagcttgggacctgagaataattatattggctgtaattgtttattgagtgcatgttaaaatccagtttctgggtcccgtatccagaggttcagattcagtggctctgcggtgggatccatgaatctgtatttttgtaaatatcatggatgattacgaaatgaaaccagaagtgcagtgtacaggtcatctccttttactgatgggacaatgacaacacaattggagcggtactgtggtcttcttcccagcccaggatgccttctgtttccccaccttgctataataccactgtatatttgggaacctctggggaccctccctggaatatgccagaggtgtgacaagctccgctgtgggcctcaatggactcagacaacgagggcatttctcacctcattagttttaaattgcctgttatttagctcaggagatgctggccactgcacagttaagcccagtgacaggaatattaacaagatgcatggaggagagcttggagctgctggagtggacatgagagatggacgtcttgcaaacaaacccacctcctgggccacatgtctctgaaaaatccacctattagtagaagaccagacttagtcatttgcaacttgaacccatttacttattcattcacttaatttttttctttgcatattcggttagcatttatttagcacctatttggagccagctcctgttctggtatttgggaaatagagctaaatcagacatcattgtcttactttactgtgattcatacggtgatgtacgaaggtgctggagaggaagaggggtctatctttcatcagatttgggggtcagtttggggcaggaatctgggctgagtctgtagtcagtctggggtctgatgtcagggatcagtctctggtcaagaaacatagtgaaggtcactagaacatccaggtccattcctgagaataattatattggctggaattgccacagagaggccttgagtatgggacatcttgggtgatgtttctcatggcccaacatgaatcttagtcctgatggtccattgccaggcaacaaggccctactatcttgagcaaggtggggataaggtttaggaggagtccagagtatcttctcacattctcattacagtgttctccactcactggggtgagggtggagggaggtagactgtttttaaggaactggttatattgttttgggtgagagtccaaacatcaactcatcttaagaatgaatccaagcttctaagtagatattttgcactttagagagacagtaatttcataaaaaggaattgctaagccactgcctaactgtgccaatgattttagctgaaggttaaactcacagaatgtcagagatggaggggcccccagggattactctggttaactgtctttgaattgtgctctctggaatcctgcatttctctgttggtgtctgtggtagaggtgtgcttgggtagaggtatgagggggccccttgtagggtctaaggcagcaagggagttagaagaaggttggcctattccatcacctcttccctaccttccattccagctccccagttccacccacattccttctctctctttgggattccaggccattcatagaaggtctactcagctctctaccagtgtcagggctcactcaactgatatgccgaataggtgccctctaaggcagtggccataacatccttcttgtggactctgggcagcaaggggcatagactggctgacagctgtcacctggataaaaggtgagtctgtctctccatgacccgcctcctctgaccccctactgaggccacttagagatatacactgtagaaaaggaatcgttttaaagaagttctctagacgacgagttagtgggtgcagcgcaccagcatggcacatgtatacatatgtaactaacctgcacaatgtgcacatgtaccctaaaacttaaagtataataaaaaaaaaagttcttcccaacacaaggtacattgcttttcgggagtattccagtgagcaggtgtgcttaacgtggcggtacaggtgagcctccagcatcaccatcttctggtcaccttttatttttttatgaagcaaataaaaaggcatttcttaaatctttggaaagttttcccccagtttttgtgatacgttctccttcaggttggatcaagaacctggtttatcacctctttccattcttgtttcaaactcatgcattcttttgatgacttaatcttttgctgactaacatggatattacggagactcaattcgggtctaggtttcaagattctcagagtctaggggaggaggcaagaatggagagagggggcagagctgcaagagcagccaggccagcagtatttgtttttctaagagcaaacaaaaaagatttgaatgcttgagctctgggggcaagggatgtggttggggaggtagaggcagggtaccatttctgtaaactatggggtggaggggtcctgtgcagcctacactgacacactcttatttcctcttgtcttccctggggagatggtgccaggacttagacaaagggaggaccatggggggaatgagaggaatagaaaggcatcctggaggaataggaagaggtgcagaaagaaaaaagcaaggttcagaacaggaggagctgcatttgtgcaggcctggaaactccaactggtctggaacaggtgcctgttcttgatcctcagtggaaccagaaagggtagaagagtaggagtgtaatttctggggaggccagctgatgggggtcgactcctttgttctcttgtagggaggttagctgatcactcctgatcaaagcgtgggtaggtttgtgcaccacatgcatcatgctgccttccagaatgttccaccctccgctgtcccctcttagtcctccaataatgctatttatcgttcctctgaggtcctggtgttcttggaatcttgttgtttttctcattcttattgaagttctaattgtattgagaggaatttagattagtttgacctgagatgggcttttagaagccaataagggtgtttcttttcagatatttagcagtatttgtcttatgaagtgctctcaaatccacactcagagaacaagcctataatttctattcaaatagcctctaatgaggtgacacttttgtcaacttatagggccaagtcaggctgtggaaaaatatatatatttggatcttttggcccttggacaaactcaaaatatgcaccaaatatgctttggagcattgtggaggcatgaaaaatagataggtgagatggagggcttgggaggtctaagcatctttggaggctgtatccctgcatcctttattcacttattcaaaaaccattcaccaaatatcttctttatgcatatgccagtaccgtgttatgtgcagggcagcaaaggatgaataagaacagaatttgatgctgcaagaatgctgtgcatccctgtgtggatatgagtgcacatggtgtatgtgtgtgtgcctgtgtgtacacacttgcctttgtgtggcaggcagacaggtgtatgaataaaacgatgaagtgtgataagagcatcactcatagcatgatgatacaatttatcatccaaattggtacatctttgggacaaaggctaaaccctgaacaataagcataatctggggctgtcttaggcaaactaagaaatatggtcacctgaagtaatgcctaacacaggaaagagcagaagacttcttggaggaggtctctttggacttccaaatggaccctccccatccattcttgacttccttcggttactgagatcccagcgcaatcatcccttcctctgggaagctttcccagacatgtcccatcaggccaacttctcatacactcttctagctctgtagctctcaccttccaagcacttatttctggaatgattatacatgcaattgtgcagtcattgtattgtatatctgcctcccgcacatcatgaagacaggcccatccatgaaggttttgtttaccatatatggatattcaataattactggaacagtgggctgagtcttggaacactgtcctacttagctaggtgcctgtctacctaaagaaagaaggaggggagtgggaaggacctggaaccagcaagtattctggtagaggagcctggtgggcgtgaggtctagagacaggatgatacatgttattggcggggggcggggtacaaatagctcagtgtggctggatcacagggtttgaagggtacagcagggaacggattgtgagaagggagaccacatcctgttgggtttgtgagccatactgttgaccctggcctatatcttccccatcttcttttccttctgagaggtttgattagatgaactctaagacatttgcaaataatctttccttgtggtccttttactagtctggctaattgtttaagaatgtttctaattgttcttatctttttttttagaaacagggtcttgctctgtcacccaggctggaatgtagtggtgcaattatagctcactgcagccttgaactcctgggttcaagggatcctcccaccctagcctgctgagtagctaggactacagataaacacctcacacctggaaaatttctgtagagattgggtcttgctatgttgcccaggctgatctcaaactcctgggcccaagtgatcctcccaccttggcctccccctgtgctgggattataggcataagcctataagacacgcccagcctgtccttacttttttatagccctcattaagataaatatttctctccattttggaaacatcaaacaattagggaaagtcatagaagagatgctaaggatgattccagaaagtgtgctgtttacattgcatgtcaaaacaagatataatgttggaaatggagtcacacgaacagcctctccttcctcctgaatacctgagacaggggcttcctgtggcctaagacaccctaggaaggctgtttctctccagtgcatcaggtactaatgagatgaccaatgagagcactattcccagctctgagagttcacagacttatacattatgcattagacaaataccatcttccatttctcttcatctgcaggtattttgttaaaagtgtgctttttcctcatataaaggttctcttagttcaagatgtgacacatctattcactgggtccctggagcccaggtgggcttaatagcaccttatcttcctcatcacaccagtgcatgcagttttgcaaagaggcactaactggagtcaccttgtcccaaagccatgaagccatttccttaagtgtatgatttggttccttgtaatctcagccactctcatattctccaagcccctcaccggctcacaaattattccagataacagctcccttgtcacctttccagcccctccttcaccatctcagctgaggagagtctatgaagaaaatgagaacagaggctcatttccaaaggcagcgacaagaatttgctaattaaaatgaaaagacttagttccctgaatcagtgaaggaggcttctgagaggcacctagaggaaatctttctccaaacgaatggcctttccagctgggccctgatagagcccaggcatccttctaactgcaggaggctggaaactggggctctgcagacctgctcccaaacaaggcctaatgaggcctcagacccatttctaggagctcctgcctctttgtttttctcagccccaaaagctcacaaggattgacctactcttcagtacattttagaatcaaggggcctttggatcatccagccaagtggttttcaaggaggctacacactagaatcacctggggaggggttaaaagatccccagacctaataaaaatgcatctctagagggggcctaggtatctgaatttgccaaaagctttccagtgcttttgctgcagagtgagaagtgggagctgctgatctcatccaatagccttatttctgggcgaggactctgagggtcagagagggagatgatgttgccccaggccacacagcaagacagtggcagagtccgggtctcctgtcttgccctttagactacacagactgcccctgctctgccttcctcacagggccgtgtgtggatgaaataacataaagggaagatagaaagtgctcagcaagagggcctgtggcctgaccatattggtatgtgtaagcatgtctggagggctgccagcaggggcctctttgcatgcagactgagggacctcataggaaatgttctgcctaagggaaaaggtggatgagatgcaagaaggcggctcaacaatgaagagaaatggagatacctgccatgcagtactatatttgattatgttgaatcatatgaaattgtgatatctgccatttttgacctataaaaaaggcagtgttttttatgattggatgtaatagtttcagaagcaataaggagaagatgagaaaaatgacacccagtgatggccacagggtcagatctgagcttaggtgtctctggttcaaagtctcctgaccactttactgcctcttctctctgttgccttggctgggcaggtgcagtctggggtacacaaaggaagtaattaagcattttcaaactgtaactatgagaaaagtcattcccgagaagctcgaggctggggtcctagtccctggttcttactcatgttttgtttttatcattattgtataaggtaatatccataactcaagtaatcctttttattcttgggaaagtcatggagactttggttttcccatacataaaatggagcaggggggagttggaatctcccagggcccttcttgtctccttaattctaatagtcaaataaaaataataatttacacttgcaaagcactttgcagcttcccaaagcatctttacagtcttgtttggcttggcactttctacaacctgatgagatagaagttattatcaccaaattttggatggagtacattcatctaaagggcccaaagagaccttagacaattgtccaagtcatacaacttgttactagtagacccagagctagaattcaggtttcctcattcctgggtgttagggtctttatacaacattggactggatatcaaaaagaggaggccaaatctgaaaggcaagagcttaaacttgaccttcacagatccaagccccctttattttatcacacaggattagtggctttgtcctactgggatgagggggaaaggattaatgcttgccttgcctctccacagctgcctgactcctcactctctgatatggtttggctgtgtccccacccaaatctcctcctgaattcccaggtgttgtgggagggacctggtgggaggtaagtgaatcatgggggcaagtctttcctgtgctgttcttgtgacagtgaataagtcttacaagatctgatggttttaaaaagaggagttcccctgcacaagttttctctctctgcctgctgccatccatgtaagacatgacttgttcctccttgccttcagccatgattgtgaggtttcctcagccatgtggacctgtaagttccatgtggaactttcttttgtaagttgcccagtctcaggtatgtctttatcagcagcatgaaaagagacgaatacactctgtaaccctaccctgtttcaacatccccaaatcttctgtagaagaaggtacatgcctttgaagttccttgcattttactttaaggtgctttatttgtgagaaccagcatgtgataatggttaggaacacagactgcctggatttggattccaggtttgccacttaacaactatgtgatctgaataaagttccttagcttcttcatgcttcagtttccccagatttcaaatggggataataatggaacctatatcatagtgttgtaagaaggattaaattagtgaattataagcatttgtattagtcaagatatgcggtagtgacaagtaaaccttcacatctcagtggcttcatctataaaggtttattcgtcatctgggctgtgtctgatgggggtcaggtaaccttccaggggcctcatgtggaactcggtgatccacatgtccttcatcttgtgaagcatcttaccgtgattttcagagtttcttaaaagtctgagagtgttgtgtgtcatctcccctcagagtctgttggccagaattagtcacatgggcccaatattattagaatgagcccgcgcagtgcagagaagctcatggactagttggtgaacaccactagctctgccagtgtatataagtatttgttaaataagataaatatgattttaagaagcctcattttttaatgtgttgatagtttaatcctgttactggagtcttgcattttattgctgtttattactttttacttgagtctcaatttaaaatttttatcacttcttattcttttatgtttttcattaattttgctttgtctttgtaacaacctcataaaaagtcgtttgactgggacagcaggagtgggaaaccctatcaacatctgggacatctctaggccactgttcctgccacccagctgtctctgcagccactctcgagtttccttggatgaaccttctagttctttcaaaaatctcaccctgggatgcttctggggttcatggttcagcctcccagggctatgcttccccacctggaattgcacgcttgcgtggttgggaaggtgttgccacagacattttctgcaggcctgatgcaaaaaactgcattttaaaaaatcctgagagtgacatcagtttctgatgcatgttaattttaccttttgtgatgaacaaaccacgccagcagaaagcctcaacccagggggctggctaacagaggtcccatcagggaggtgccctggcccagcgcaggtgaagggtcagatgatgttgatatcccctacaggtatccgcaggtagggtacactatccagcccccaggattgttcttcctgagttactcacattccacttcggcaggccttaagaagattgcttgtgtaataggctcctaactccctttcctttatgggcagcattaagcagaaggcctgcaaagaggggtgtactgtgactttggaatagagtcagctgggagatcaaccgcatttgtcagacatgtaaagcaatgtgagctggctgagaattctaaaatcggaaaagaagggagccttcttcccctgtagagtagaggcctagagttctcttggaaaagccactggggcatcaggaagaatcagggctgccattctctgctctaggtctgtctctctaaaggttgaaagatgccgttctggggcactttggcaggatgtgtagagggatgtctctgcagaggggttttatccgctttcagagttggagccataatgacagtattcccaacatcatgcacatttaatccccctcctgtggcctctggggattttttttcccacataaaatgtctcaagcccttattccacaaatggcctgatttcttgctgggccccagatggaggcctctgccccctttttttccctgcaggcaggcctgcactcatgggcccttccctagcctttggcctataccactgtttctgggaattttctctctttggttgattctccagtacacctcactccagtcctgaaaacctaaaatctccttgtcctgcttcaaaaactggaaagaaatgcatagccgcagaccagctgagctgagctatgctgcctgtgtctcagggagctatgacttttacaggtaagacggctcacttcttcaggttcagccagcatcctggaggatgctcctcagagacagcacatttattttgttcttgtctgtttggggttataaaggcataagccatgatgtattggattaaaaagtagttaacaatttttgcgtttcaagagacctggattttagtcatattcctagtttcagatctgttacttttccggtggcataggtaaagaaaaattggccaacatcttcctttttgttagagtgtataccatgtgattgtctttggtttttgtgacgagggcattttgtctttctggttctgtcaagcaggacatgagctgtcttagcacgtttcccctccgaaggcacccacagtctgtttggacatatggtacctctctgaggatcttttagcttgcacttgttccacaaccccaaagcagcattacttatctctggggaactggatgccaagctgtctgggtgtcccttgaggccctgctgggggtgattagtgatggctgattgctctccaaggccactctcagagacagatggattcacctccgaggaaaatttctcacccagcttcttattttgcacagaccttgctggaactgactggtggaatgtagcaggaatcggagggaagctttactcatcattccagtccagggaccaacataggaaattatattaaaattggttcttctctgcttacttccgtcctctagttgcatattcttaatcaggtaaagcatttgttaaccttgtttttaatacttagaggagtgccctggagcctgtctgccctcatgattgtctggagaggtgagaagaccaggagtagtaaaacagaccaaagatttcccaatttctcttggggaagtggctgggattggggatggtggccaatgggagcccaactttattggtaaaattctgattattttatgagaagaatgtatttttgtatcatttgtgtaattaaaaaattaagcaaatgaataatatgaacacttcagttcttaaacattgacaatgtatatactggatgtaataaaacgcactgaattgaaaaaactttgctttggtgatttgtaagagaggagttttccctgtcattttcttttgctttgatcaggggatactagataatatcaaaccggctttatccaaactgtatattgacaaataggagacttgtcttcccaatatctggtgtgacaaggaatctcaaagaattgatcagaatgcattccttcattggtactatgtggtgttaattattgtagcactcttgaaaattgtttggttattcttgtatgtttatgtttttcatattaactttaaaattgttttttccagttacttactaaaagactcatattgattttgattgaagcggcattaaacttattcttttagtttacggtagaattggcatgttaactatagtgattgtgactgtctactgaatctcttagtttattcctgtcatcttttaggtctcaagatagagttctatagctttctttatgtgggtcctgcacatttcttaagtccattcctgggcttcctgtattttgtgctgctattgtgagtgtaatttttcttttccattatgttttctaatatataattgatactatactaatgaatgaattcattagtttattctacaagtatgaatagagaagctatttatttattttgcatacttattttataacctgtgcctttattgaattttcttatcagtcttaatagtttttggcattactagacatataccaaagattgaattaactttgggccttcatttataaaagtaattgtggtggtcttaaaacatttatgaaaatctttaatactgcttttataaaaagaacaagtctatgtcctcttctcttgaatcactgctgacctcagtgaatcctttgtaacctgtagaatctaacaagtgatgagatgtaacttcaaaggtcaggtgggaaaaggttacttaggtttcaccaggatctcttgggacactcactgtgggtgaagatatgggctatgtaattagtctgactactctgggctgtctgtgctgaagaggccacatgaaggcactttaattgacagctccactgagtctcccagccaacagccagcatcaacagcagccatacatgtgagtcgtcctggacatccagcccagtcaaggcttaaagatgtctgtagtcctgacatctgtaaccacatgaaagacccttctcaagagctgccagactgaaccctttcagaattcctgacccacaaaattatgaaaaaataaaatatacttgctttgggataattggtcacacagcaacggtaactgtaacaatgatctcttagctattgattaatattgctagctgcattggcatcatccaaaaatactaaattacagcaaggatgtagacatccatgactttactagaaatacacttagattttctctgttatttaatatgcttgctgctgatatcatgcattttgtagtaataactctcaaagcttagtggctaagaaccacaatggtttatttctcatacacacaacgttctgggagtccagtaactcccaagagtaactatactccgtgtggtgattcagtgatccaggctgagggaatctcccccatccctatggctgcaccatctacaatgcaggacctccttgatagatgactcaaggaaagaaaatgctagagagtctctcaacagtcattaaatactttggtataaaactgatacattatcagttctgcttatgcttattggtcaagacttgtcacatgactccagctaattacaaggagggtgagcggtgtaatcttcctttatgccaagaaggagtggagaagtggatactggtgaactctagtaatatctaccactaattattttaacttcttatgctaacaaagtatcctacaattaatagcttattgaggccatcatatttcatcaggaattgatattaaattttgtcaaatgttttttaagtattaagatgattatatgtctttctttttactgttaggcttcctcatattgaagtatttttgaattcttggcatataggctacttggacttagtatattactttttttttttttttttttgagacagagtttcactcttgttgcccaggctggagtgcaatggtgtgatcttggctcactgtaacctctgcctcccgggttcaaacgattctcctgcctcagcctcctgagtagctgggattacaggcacgtgccaccatgacggctgattttttttgtatttttaatagagacagggtttcaccatgttgaccaggctggtctcgaactcctgacctcaggtgatctgcccgcctcagcctcccaaagtgctgggattacaggcatgagccactgcgcctggctggtatattactttttaaaagactatgggggtcattaatgattttaatgtaatcattaaaatttagtaaaaatcttcacatttatgtggctggtttagaggttgtaggggtttttttggtgtgtattctgtcaaatttggtatctgtgcaatttcttcataatattcataatatgaattaagctttcttttatttgcattgttttggaatagtacatactgcataataactattttttaatttgaaagttcgatccagctcactcatgaaactacctgctcttgtatctttcagagatgagtcaacaacttaacaaaactttcttctctgatagcaggtcaacttgggttttctatttcttgagccaattttgataatatacatcatcaagattttaaaatttactagccatgattgttgatgatatccttttataattatgtataatttctatattcactattatatcccctttctgtctcctaattttggttatttgtgttttctctcgattagacttctcagcaatttgttttgttggatacaacaacaaaaaatttcttgtgtttagaaaatctagtgtttttctgcatctgtggagattcattgtaaaatgtctttcttttttttggcagagacctgatttcacaggcaggcacattctctcattcctcaaagtgaacctctgcttttgaactcctgcatcttttcatgtgtctggtgatgttttcctgtttgttcacccttacaagcgaaggtgtgagcttgctcagagttggggtctgggctgccagagagcatcatggaggggccagaaaagggaagggatagttgagatgtgctgttatttttctttagcaggccagaaatttgacagcctgtgagggcagagagcttaggcagagctggtacggggagctagtacaaggagcttcatcaaccctgggagaggtttgtatcggcatttagtgttggctggaacgcacgcccccatctgttttcctgtcacaattttctccattaggagctagctgcctacatggtttgtcaggagccatgttctgccaaggataggctgggcgtaagcattgctgcaagctgcttactctgcatgcatggatcccagatccacatactctccaccccactggtcaaccaccctcttgctcttgcaccctatgctagggctctcagtgggattttagtaaaacaggaccccttaccatccttcttactgtctattgggtaggctcaccaagtattttcaacaaaaatatgagatggcaggactcctgttcccaaacctgagcaggaaattaatatcttgacacataggatgagcttaggacatgagtagaacttctcccatgaatcactttacatcaagtccattttttatccctagatcaaaagcctggttggacatctggcggccctctatgggtgttggcagaatcccatttcagattaacagctggatgataggctattgtgcatagctgaagcccagtttcccagctagtgttcccctgaaagcaaaaccttaaacgaaattttttttggaaatatgattccaggaagcaatgagaataggagttgtaagtcagggaaggaacgagaaagaggtattacaaggtgtgttatagagttggctactcttacagggtctgcttgttctgggaccatttgaaaagtcgcatgaaatacacttaagaactgccttcagaggaaagagaggaggaagcatttgttcacagcctccaggcccctatcagtcaaagatttcattgttaacttccctgcatttctgggtagcacactcacaagtgctaagtgggttcctgtgggcatctcagagaatagtaccagaaattgtggcacaggaaacaagagctgcagagcctgtctgaggaaaggcaccatggacttcccatatatgaaatctgaagaagcatgcttggaaattgttcccatggccgtggatgacataagcggttaggctgagaatatttgaagtggtacacaagaggcatctgttttacccagttttgtatgccaacaaggtgctcttaccactcccttcctctctctggggtgcttcaaatggatttgaaagccaaaatcctcagcatacatttcttcaagattctctctgctgttttcctgcccatacaagtttttcttaatgtcatttcatctcccaggagatagaaatggacgattgaccaattttctgagtgagtacagaccatctggagcaggcacctgggcgggatgagccactttatcttctctgaggcttctttgcatcttttaggcagcaaaacatgattcagcatcaaccactgattacgattctcatttcagcttcttgtgtcttgtaatcagaggaaattcctcccggattcacacaatagcttggccgccaggtgtggtcccatgtttccagctttgactacatatttgtagggattttaaaggaaagtgggatgggatggagtcagtcctcattataacccggagcaggggtttacttcttggccctgccatgcctcgccttaatagagaaacagattcatcttctatctcagcacatgtatctgttaggctcttcatcattcaaaaggagatactaattctctttctggctcagctggctcttaaactcggactccaaattcaatcaacaactcagaatagctatttcactggttctgggctaaaagcctccagctcatggacactcagagaggagagaaaacttgtttatataatactaaagattctgaaaccctacatctggcttaggtctgacttgcagagaaccatgtagctgggccccttcattttggtccttcagtgaagagctttcactgaattgttctatggcatgaggccatgagtcttcagggaggggaatccattgtgtcagcgaaggatgttgttgaagccattatttattaaggggactcatgaaaaaaatttcttctaggctctatagcaggaatgttttttagttattctgagcaagagatttttttttcccttttggacattgactaactgactgtgttccccttttgtgggagatgggcagtgccacattttcaaacctcttgatccaggtatatggcaggtcttggggtatgaccctgttcctggcatcatcttatctgttctgcctggattttcctatgttcttctcacctcttctttttatataattggcctttccgggtattaaagtaatataacatttataaaatgtagaaaattataaagaacaaaaattacttgtgttccctatgatgaaagataaccactgttaatatactgatgttgtttttcatacatttatatattcaatttattttctctatgcatctgtaattctctgtatatgtctctatctattcatgtattccaaatgtccttgaataactagttaaattttgttccaatgcctattcaatagagtgggagaactgatgacctcctcagtttatgttaatttccagggggttataatcccatgcttttctctgtctccagttgttcagtttgtgagtatcatctccctgtgggtgccatgtctctactgaatgtcaatgatgagtccaggctcagtcctgtcattaaatttcaagagaaagccactcaggccaagcctttgttgagtctcgttgcatatcctaaagattaagtggtcaaaagttttctgaaattaactagagtggtttctttctcttatctcaccagctgcttctgcttctattcctgttcttttctccttgccacccccaaaccctgtcagagggaatcaaatccctcttcttgccttctgcatggtatgttgttgacctcatcccttgtctccaggaatctgagggcttctaggttccctggagttctgatggaaggcttgagcctttggaattaaagaaagatcttaagtcaaaccagagctaccaatcaaggtgctcctaggtctgacatgcgctcacactccaggtctagccacacaggaaggccaggctaggatccacctggacagccaacagacacataaagagagctgtgccagtatcatcagtctctctccaggacggcagcacatagggtgggatgtccctctctgctaacgttgatccttagcatcactgtgagaacccaagacttgaagcacccaaaatagcttagcttcaagttcaggggtactatggaggtgtcaaggaagataagagatatttaagcatatttccatggaaatatgacaactgtatgctgttaagtgagaagaagcaggtctcagagtatatactggttgatgccacttacgtagaatatgtttatgcatagaaaggtctggaatggcataaaaatgttaacaggtacctttgagaagtgggaactttcaccttttgccttaaataattttatattgagtcctttcaagtgagtatgtgctacttttatcataacactttaaaagcaatttccattttggggaaagatgatatgcccccaaatatttttttttaaagtgggagttatgtgagatttttttccttctttctaattttctttctccagtgtcgtattacatttgtggccaaagcataaatgtagcaggcagactacgtgagattaacatgaccaaggacaaagtgacaagataactagccggctggacaccaggttccccatgtcatacccaagctgggaatcacatgttctctagactctgtggcctgggaggcctagtgagccatgtatctaggttcctcaggcagaagaaccctgccagggttcccaagactgcaagagaacaaggtgaaccctgcgctccacccctgcggcttgtgtttccagctcaggcttatatctggacacatacaaagaacttgggaactagtaaactccaaggagtcaggttctagttatttcttctgctcatccagaagaaaatagaggacatatgcatccaactgagaggttggcagcctcatgtcccagtttgagtactggtttgtcccagttccttttgggctcatatctgttcccctctaataacaacagcattaaaaacagtgcttgcctaattttagcatgtattataatcacctggggcacttgctgaacatatagaatcctagctcctatcctggacctattgaatcaggctctacacgttgagaagtttccctggtgtaatggtgtaggtgacccatggattgcactctgagattagagagttaacgggtgcatcaggaaccactggtttcatacctaagctcagcagtgttttattttattttattttattttatttttgagacaggatatcactctgttgcccagggtggactgcagtggcgcagtctcagcttgctgcagcctcaacttcctaggctcaggcaatccactcacctcagcctcctgagtaactgggactacaggtgtgtgccaccatgcctggctaatttgtttgaactttttgtggagataaggtctcattatgttgcccaggctggtcttgaactcctgggcctaagtgatctcccactttggtcttccaaagtgctgagataacaggtgtaagccaccatgcctggccaacttcagcatttactggaaaattgagaggaggggtctatgtcaagaagtagaatccctgccccttgattctgagtattccatgtaactagctctgtccaaggggatgttgcagatatgattcaagcaaaggcctagcaaaatatatatgtgattggactttctctctctcatgctcctgctattatcatgaggagcatatgcacaggctaccttgttggtcccaggaggaggatgaaaaaataaggcgcaaggctgtaacagctcatgtgccccagccaagccttgcctagaatagagcccttagccaacacatgaatgagcctagctgagattagctgagctcagcttagatcagagagtcttagctggctgctatcaaatatttttctttcaagttactgagttttgggttgtttattatgcagccatagctagctgatacatttaggcagctcgttaccaaggcagaccctgaaattgtgattctctgggcttaggaatctgtatgtttaacaaagttcccagtgattctcatgccactgctctatgaaccacacttgagaaacaccactttacactcaacccttttactagctcaatgtgcagtcatggaaaatcccttgatgtttctgagcctcaactttttcgtctgcaaagagggaataatatgtatttcctgtgatgtaaggattaacttaaatataaagaaacctagctgataattttttctcctcctccttcaacttgtccccacctcatccctacccaacctcaggaagacaccagtacgaatatcttaggaaaacatgaatctcagggtcacagctttattgtatagattttttaacacagccatgttacaaacattgtcagggaacatttacaagaataaataagatggacttgcaggtgtaaaaagattacacttcactgtaatgtacagtcaaaaaatatatctgatattcattgacctgacattatttaccttctgcttttctgagctagaattgaaaagaaaaaaaaaacattgacagcacagtgctggcttttttaaaaagttgatttattttgttttctcttctcatacgtgctttatctatcaaacacccaaactgtacaagtgcaggccattgggattcatggaggaggctgcaaagagtgtggagactttggtctcatgcaatattatatgcccagtggatgtgaagatgtcagcctccctggagttgagcgggaaccttgggatagcttgtgagggtgtccagaagccaaggcaatggtagaggccacaactctttgtctttgattggctagtagaatgtagggtgaaaagtgcttttgagtatgattaccaatatgggttaacccggatttacatgggctagctcaggatccacctggtgatgaaatgtgtgcactggaaatgattataatcatgtgtaaattgagttactgtgcttttgcttttgcagtgtgctccaacaggccttgaatagggagtggggtagaaataacctctggagataatgtgtatggtaagaaaagccctgctctgtgtcctacttggaccttcactggttctggctgtcactcatggccctgttggtcagtgggtctgagttatggctgctctcatgagagatctacatgggtattgggtctatggcaaagcagctgttccctatggtttgctgtttggtgataaccagcctggatcagcccagtatatgtggccacaacagcatgttggcctgctcagtgggggcacttgggtgggagagcagggggcttcagcctgtacagaccaaacacaatctacttggattcgtgctctacaggtatgaatgagttcaaacatgatcccagctccacaagatctcacccatctggaatggaagtgacctgaaatccatttcaccaatgcttctcttccctttaaagagacacctgccttcttttagacagctgctgagatgggcagcttatcctctctggcagacagcaggttcttccttacagctattaagtttcactcatgggtcctagttatactcagaggagtgacctgggtctagcaaactgtgcttgacttcatccaagaatctgcagagctatggaagatatggacaccatattctgcctgacccctcagaagcctaactttacatggaatgacaccactctgccctctaagcctccagactgccctggggcctttgacccaaagaacacctgacattattcatcttccatgggagatacagggacagggtggacactgagagtttgttggaccatcatagagaaggcccactgatttgtattcataagcccaaaggcactgaagtaattgtacagagactcaattttgtaattttggtggtttacttcctatgaccctttctcctccacatccaagagtcctgctcactaaggaaccatgaactacattaattaccctgagctccaggcttttatactgatacttttctgtccaacacttcaaggccaccagacactcattctccgaacattccaattaaggatcagagtccacatctcaccacccagagcagttctcagatatagaaggaagccccataatgatcaagcccctaaaactcttcccaatagattttctttcatcctgagcccttgcacttcccttgtatctgccccagtggaccacccctgagctcttagataggtgggatgctaggtttggaggctaccattgtgagtgttgatgcctccttttagagacctaacattcatgagtggatttcagttggtgaatgccctttgatgaccttttcccatctcttctggaggtgggcaggtgggatgcaaaagactggcttgatctctacaagacatctctatagtcagtgccatgcaaaagcccatccctggttactaaaaaactagaagagtctgctcatgtgcacaaatatggcttagatatctctgctgtgcttcggaggatcagatccatgatcctgaaaaatgtgtcagaagaaactggagctagaacagctccccccacactccaccactaacctctctccctgctgttcagtctatgacctcaaaggcagatccctgcaagacaaagccaaggccttgcattctatcacttctagacatgtatacatggaaaacctccaacagggaaactttgcatgggaggagtaaacaaatctgaatctcagcttgtctcttctagttggatttacttttcctatttccttgttttacttggctgtgatttgaagctggtcacaggctaagaaggagctcagactgttaagtaatggggaagccaagtcagggatttgagatgacatgactatccacgtttatgttttttttcttctaacctaccctccagttgggttgaccatttttttccctggggatcctggcccagcacaacctgttgacatgacttaggaacagcgtcctgttcatgcttcctcttgggctcacccatgtcttccagagtgttactcctggttgagcttggtgctgatgacctgtttacccagcccaggagtggcaagctgcagcctaaggaagggtggctttcttcattttgtcccaaggcagtgaggtaccaaggaattatcatttccttcaatgtctctggatctgggttgggcagtcactcctgcagaggtaacaggataagggcctggctgctactccctgggcctcacttctgttgtgtagagcagtcttactggactgatacctctatgtactctaaggggttcccaccagcgacgaggaaatgtagatcctggtgaggacttacagcaagagctagtgtggcaatggggagtggaggatgaataaacatgatgggtcagagggaaatgcatcatcttttgccccagacactgagatttgcccttgttccaagtggctctggcaagctgttacccatcctttctccagctatgtcacagaagtgaccattttgctaaataagtcatctgcatcctcggttctgagtattcactgggttccagtttcctggccttgcgttcctgttttcctgcctaaagtgctccaaatctaccccttctaatgttgatgagggtccttttttcatgtatgtttttcatgtatgtatgttttcgttcaaactaaagactgagctctgtccaccacaaccccatgccttacccaggaattaattgtgccatagtaatctcgatttcctaatagtgccccctccaaggtgctaggtgctgtaggcacccagtaattatgtgtggctagggtaaagtgaggagccttccagaccccagctgctcatgaagtgtgtcctcagacttgcccacattagcaaccatgtgactccacttggacaacaggcaccactttccagcctagcattcaggaatctgctgagtacagctgtgtccagcttctcttttccctttagggttttgtgggctcatccttctccacgccagatgagcaaatcctcatcattctagtgtgagttaatgggttccttccagcacccaactggaagatgccttagttgaggtcccctcatgaacagtgaggtcagagcacccacacaccaaaggagctgcctaggagaaggtcagttggtcttgatcttgagcctataactggctctgggaggcagcagggtcactgctcctagagtcaattctagggtcaagctgaagaccagctgacctagggtccgtcatagcggggtgaacagaacagaacaacatgaggaacagagcacatttttttttgaaatattcatagagtcatattaaaaccaacaaggctaaatcagaaagtggaatgcaaattttgcatgaattgtgaacgtaaaacatgagactatgaaggaattttaagcttactgttgtttgctttgagctttatccactgacgtatctgttccactctagtctcttctgttatgggtaacctcctgggaaaaatgtgagatacaatggtggaaaaatattgtctctgtagtgagaaaaaaccggtttaaatcctggttcattcactcactagctgtggaactgtgggcaagtgatttctcccctaggagccttagtttcctcatcagtaaatggtgacaatcacaaaccctcctttagaatgctggaagaatttaatgagctcacatgttagagtccccagcatagggtctgttggttcctttgcaggccacacccacagagagggccagcactaaaagcaaactgtccccttccattcccacaaagagaggcctactgtggccttctagaggcccaaggacccctggttggcccagattcttcaccccagaaaggatgcaatgttggagtgcagctaagatacatcctgaagctatttaggccataaacacaggtggagaaatttcctgggcttctcattacttccttgcatcttccccaaacagagcccacatctatgaggtaagagctcctgttgtaaagactcagagagcattaataatattttcctctgctcatgacaggctgagctcaccctgtaaatggggtggggtggggagaccccctgggggtggtggtgttggctccggagatttcctgggtaaaggaaaatgttcaaattcctgggcactggtgccccatctcatccaagccttgccacatccttgtcccatgggatcttagggaagtcatccccatccataagcctcaatttcttcctgtgtgcactggcctaagacctattcactgtcctgctttagagaatggttgggttgtgggaaaataaggggatgagctgggggaaatcatcactggcccttgctgggttaccccaacatggcctgagattttttttttttgcaagtttgtttctccctgaagtcacaccttaaattcctaccatttaaaatgataaaagccactgtcttttgtatctgccagctatttcaccccttcctgagcagaaaaaaatcttaggatttgtgttaaatagctctccctccaccctcatcctgtctggatgtaccaagatctaagaaaatagcatacagcaggcagatttgccatgctacaggctccttgcaggctggggaaggccagctggggcattgggctggagccgagggaggccagcaggcccagtgggggtgggtccccggggtctgctgaaatacacctggggagaggctcatcaaaggaaaagagcaagttcatcgtggggttcctttgcttgcctttgctttgaggcacttccttttgaacctctaaagtgacagcccttccttgatcaagtctggtgtccctggacttctggacagctccagagcccatgccaatggaagcaacttttgtcggctcctttcatgttccatcctcatgggcctggagatctgggttggtgaccctgctccgtggtaaagcagagaccctgggtttctcatagaatctgagtctcatgatccattgcatatttagttccagcaacaaaacaatgagcagacagacaaatagatgtgatattaaaaagtgcacgcttaagggaatgttttcacagtgtctgatgaaaggaaaagaggcagccccattggcccagaaggagtcttggccaacacgaagctgagtgcatctctctaaagctccatggactccttgttgccaataggacaaagtctgtactcgcgatgggcatctgtctcctggaccctggctcatctcttgctgctccccgtgttgtgctgtgcccgcactgggctggcctcccccagactgcttctcccaatgccttttcacatttctttgccattgcacatatggatccctttgcctgagtttcctttttttcctttttatgcttgttaagacccagcaggaatggacgtccccttctccaggaagcccgaggccgaagagactttcttgctcctaggctcatggaacactcatccactccacactactgcaccatggttccatttccccagcatacagtgggctcttgagggccaaagctgtaccttcttgaattctctgcccctcatgccctgtctggggctagaccagccttcaagatggagcttcctaggtcccagcccacctgaggctgtcagatattgggcctaagcactggctagagatcaaggtcgagagtttccctggctggtccattcatagcctgaaggaacagggaattgtttttactgactaagaaattagatgagactggctttcctggggagctgggaatgtgttactaaaatatatctgaaattctgcgcttcccagaagaactggcatcaggaagaaagtactaaatttccatttgtggagttatctgctcagaagtttctggccttattttccctccataaaataattgcttggcttagagaagatgaagaaaacagcacggagaagtctcattgccattacctgcccctttggaacccaggatttcattactaaggaaggtgcgtgggtttcctcattggaggagatgatcaaatggagatgataacaagtcagtagctctctcctgggggttctaaggactgtgtgaaatgtcctatggaaagtgccaagcatgatccctggcatacagtagagacttagcaaatgttggttccctctcattgactcactcacactttggacaagaccctagatctccaggcctgattctcttggcctattttaaatcaaagtataatgggctccacaatggcctttttcaaggtggctgctgggtttctttaggaaggagttcaaatttggacatccaaattatgcacaaagctggtgctctatttgccccagaaaccaaagggaccatcttcaggctcacccatctctccttgctcagtggcatgctgtcccagggtgggagcttttaaggacattgccaggaaaaaataaaaggcccgagagatttgtcttagaggtacatactcaaactcccccgcccccttctttttgacataagagactaagattttacaccctccaaaagaaagtttcttttcacatacactttggaaaataatcaaatcttatcttgtttgtctcttccaaagaaagctaccaccaaagaaacacaggggttacatcctacaggtcagcccaagccctgccccagggaggtggtccctttttacaaagacaaggaggagcagagaagttccctgcagttccaccccctcccactgaccacacaaaaaagcaaagaacacctttatcaaaaactgctgtggacacagctggccggccagtgaatgctggacggtcaaggcccaggctggggaaggggtacagaatggttgtgggcgaagccccatgcaggttaggtgtgaggatggggggcctctcttgtggcctagggaacatcgtaaggtcacactggtccagactgcaaatgtctggtgccagaggcccctgaaggaggttgcagggggcagcagagcagtgacccccaagagcctcaatcttttccatgacgtagaggagcagaacacacatctcctccactcctaaggagaaggagggcaggggagcctcccactccccagcacctgcacagttggcttgccaagagatccacaaactcagaacaaaagcaggtggtctgggagccagaaatccaaggccttgcttgtgggtgtacttctgcttgggcccttggctgtggctggttaggttgaaaaggaagcctgggccttttggagcagcatctcccacggcaacaggagacccctcagaaggtgcagagccccccgtggaacacagggccaccagtcttctccttggagtcaggcagggtgccacctcagagctcctgagcccagttactgccattcacacaaaagggggcttggtcacagcagcctctggactccggcaggttccccatcccattgagctaaaaggagcttaaatattccagtgccacctcgtatacaaatttatactgttcctgagaggcggagaggagcagaggcagagagggagaagaggagacgagagagatgaaaaaggaaagggaaaatgcatttagtttagagatacagattttggagaaaactttttctatatccatattatgtcaactcaaaattacccatatctggacatccttcaaaattctgcttgatgcctgcttctacccaagcttcctcgaatgcccagctggcatcattccctttcttttttactgttttgtacaacagggcttctcaaactgtaacgtgcatacaaggcagccagaaatctttttaaaatgcacattctgattcagtaaatctggagtggggctcaagattctgcatttctaacaagctcccagataatgatgctgctgctggtctgtgacccacacgttaatatggcctcattttgactaagaccactattcgagtaggtttaaagacttatattaaagctcctcgtgcatggtgcggtggtccaccatggtaccaggtcttatcacccggggctctgcccacacactctctttatcacactttcctccatagtactctctactataaatgctctctattgtaaaaattaccataaattaattggaatataattggactgaattgaaaacatacttcacattctactaatccagcatcctttcctttaggcctgaattaatgacactgtcttaaggaatgggcagaaagtgaagcaaagtaggtgtaccaggattagtaattggattttcctgcaagaaagaaaagttggggaggttggaaggggaagacacaggacagacaacagtgcataccaagggcacagaatgcaggtatacaattagcagccaggtgttgagtgatgttactatttgatgtcattttctccaggtcaagggaactagtcagccctggctgttggagaacagtccttgggatactcaccagggtctccaccatgttggatttgttgttacgcagtgttttcacgatgtggaacacgtcaatgatgttttgctgctggatcatctcacacacactgcagatggcacagaaggttccactacggcctcccccatttctaaacacagagcaaagaggtgagccatgttcctaggtcccttccaggcacctgatgattctaaagctacatcagtaggagtagggatcagctgtctgggcagatgcaaggcaaggcaatggtgaaggctttagcctgagccatgagttatggtttgagtcccatctgtgccattaacttgctttgaccttggccaagtcacttcctctgtctgggccccaagttccccacttgtataatgaaggggttggactagatgacctttgagagttcaattagcttgatgttttcttggttctatgagcatgttacagtcactcagggcacactcacccaaaccccaagggcaggatggtactgtgtctttgtacatgtgacacctgcatccttgctgatgcttgcatccatgtccaaaagaatgctctgggtccacttaaacatccaataaagacaatgaaaatttccaagtgattttcctactagttcttcccatcctccactaaggacagcaatgctctgttagcctagggtcagccagcccaagcttggaggtaggaacttggagggaggaactggtcctgataggctttatcttaaaatgacaggtctctactatacactttggtttaagcaagatgctactgatcttgagtctagggatacagggttggtggcagaactgtgtctctgttactcctttctgaaactccataaatcatcttcatggaaacacccttcaaactctttacagacagtccctgtaggaatatgcctgattcagaactcctgggcgtgttgccaagagcaactaatgatttcatgtaatggtctgtgtctaaagaacatctggacagaaactaaggcactcagtcaatctcccagatgttttatctacaggacatgcagtgaccagatgtttcaagtacagagagttgctttccattcactgactggtgcctgcatttcaaggtctgttatggtgtctgtggccctcaaggaaaccaagttccctgttggtaaaagaatgcccctgtaccttcctttggctcaaactactggccaccttggctggaaaggacatagataaaaagacactagtgcaaaaaaaaaaaaaaaaaagcaggctaaaaaacaaacatgagagagagagagaggagagaaaggtctcctatgaaagacggttctatcatttctgaagcaagaataacagcgtccaaaaggaagaggtgagtagacacagggtctcagggcctggtggtgtgagaccctgaaagatgggtgctaaggtaaggtcacctgaatgtgtgggaggcatctgggcatctggaggcagcagctattagctggcaggaaaccagctgctagtttctgggatgtgggcagagccagctgggcttggctgatgtcacccatcagcctgacttgggacactacgcagcatcttcctgaactctagcctgaggtttgcttcctctggagaagaatttttgctgcaggtggtggccctgaagctctgtgtgtgcatctctatgtgtctgtgtgtttaacctcctttaagctctttgacttgcctaacatgtgcatgcaccacctgtttgagagggagaataattagctggttttgaaaagactgacctcaattctgaggtcagtcagatgttatcagtgcctccactagctccagaaatatttgttgtaagaaagagaagaccttcgttcaaatttcctttaacataacattttaaaagagagaggccttctcaatgacttttcctcaaatcgttgaagttctaagaagcaaagtgagtgtgaatcaaatatttcacacatagctgttatggctgcagatttgttttgggtgtgagactttgtagaatcctctgtggtcactctatactcccaggatagattctgtgacacttgctcttttaagtaattacatttacgtttgcatatttgctaccatgacattcttggtctctatgttggcagataaagtgtgttcactttctatttcatgccaaagcactataaggtctgaagattgtctaattccacatacccaatgaacagacgaggaaactcaggcttataaaattcagtgattttcttgacgttgcacagcttgtcagccactgtcctctcgaggtcctgacctccacccagcgtaatgacaccagaattcattagactggacaatgtccattcgaagacaggaggtaaagtctccagttcaccccagcaatgggggtataaacacagctggtctggagctcactgtgcccctgcacaatagtgttcctagagtccttcacatccatctatcagcccctgagggcagtgcctttccctcatgctctttttgtcctatgatccctttaagcccattgtagagaagcaggcaacctcctctcatgtttgtggaaagaccactaggttttgcatcaataatatgtcatatattagttcaggacaacaaactggcagccccgttccattaaaggatcataattcctttgaatgtactgccactagcctttgagggatgttgagttgtggtatagccaggcctgcctaggactggggtatgtggccagcagcatctgcaaggatgctctatcacccaccaccctattgccctggtgacacctccctagtactcacaggcagtggaccacagtacgtccctccctcccgtcatactgctcctgccacttctccagtcgtcggaccactttgagcagagagcgcttggaggggggcgtgtcccggtaggcaggccagccaatgtactggaggtgctggactatacgataaccatcctgtggctgagaacagagaggctgttagggctgttctgctggggatgcttgcgtacatgcaccttgcagataccccggggactgcagcatcatggtggaagacagaccaaatgggatctaagccatgtcctcacggggagagtccccatgactacttctattccttcgtgtacacagattctcttgccgtgactgccctgaacccccttttgtacctgaaaaactcctgctcagccttcaaaacccaatttaaatgtccctttctttaggaaagccttccctgactctgttgggcagagttttttctccctgaggctcatgtgccagaacatgtctcactgtctcagtggacagtgaactctgagcaggggggtaggggaggtgctgagctcctttcatcctgggccccaagtagtgaccaaagctgcattagttagcaaccatttcatagattgctaatctgcccctcccacccactactctgctcagccagtgaacatcctcatggaagtaagtaatcacttttcatctaggtgttggcagtgcctggcccaaagcttatgggatccaatcaaaggctgcatcaactcatgccagtacagagacacagtggggaagagctaatgtctaagaagttttgtctacacggcagcaagtgtgtcaggaaacaggcagatggcaggttggatgtcgctcgttgcatctctatgtgttggagtcattgctgagtctggagccggaatcagcacaggcatcacttcctcaaggaagaaattatcaggagagcacaacacagactcttggctggctcagcgggatcctctctcggcagcctccatctgtcttggggaggaggggctcagcaagcaatggcggccgtgtacttacccgggccatgttacagatgcggaatattctgtggatgatgtcctcgtcgatgtctgcggagacgaactccacctggatgggcccatagcacccggaggtcttctcaggccagtactgcatacagaactgagataaggaaagaggtcacagaaggagctcaaaggcagggggcgggtatcaaagtctcatttatcaacaagcttttcttttctttttttctttttcttttttttttttgagatggagcatcactcttgttgcccagcctggagtgcattggcacgattttggctcactgcaacctctgcctcccaggttcaagtgattctcctgcctcagcctcccaagtagctgggattataggcacctgccaccatgtctggctatttttagtaaagatggggtttcgccgtgttggccaggctagtcttgaactcctgacctcgggtgatccacctgtcccagcctcccagagtgctaggattataggtgtgagccactgtgcccagccgtcaccaagctttttttatggctggaaggacacattggccagaaaggtagagtattatgtaggaaattagactcagtttcccctttagggagcagccatccactttttctggtgttgaaatatcaaggctttgagcacagaaacactgggcttgcaaatctttgctatgttgatttcaaaccatttgttaggtttgcttaacctgagtttcctcatctgtaaaatggggagaataatatctacctctaagccccgctgtcaggattagatagaacatgctaaagaaagggcaagtaccatctatttttcttttcaccacgcaaatcatcacaagctcttcctcattccaggaaaaccttcatagtgttcattcatgatcagatcagaagtagtgtaaaaaatataggggtttcgggaggcggagcttgcagtgagctgagatcgcgccactgcactccagcctgggtgacacagcgagactccatctcaaaaaaaaaaaaaaaaaaaaaaaaaaaatatatatatatatgggtttgacctcaggcggccttgggtccaaatctggtctcaggtgctcactagctgtgcagcccaggcctcagttttctcataggtaaagtggggataattatgcttactttgcaccaaaagttaatgtcacatggtgctgacagatcttgcctatgattctttctatttatctggaattggaaattagaacctacagctgagagcaaaaggcagtgattgaccttctgtttaagacagtggttctcagtctgagactgttttgtttcccagagggcatctgggcaatgtctgaagacattttgattgtcacacctgcgggttgctatgggcatttagtgagtagaggagaggatgctactcaacatcctgcagtgcacagattagctccccccgagagttatgtggccccaaatatccatagtgcagagactgagaaaacctagtataaaatcattataattattattattattatttttgagacggagtctcactctgttacctaggcgggagtgcagtggtgcgatcttggcttgctgcaacctctgcctcccgggttcaagtggttctcctgcctcagcctcccaagtagttgtgactacaggcatgtgccatcacacccggctattttattttttttatttttattttgtgtttttagtagagacagagcctcaccgtgttagccaggatggtcttgatctcctgacctcgtgatccacccaccttggcctcccaaagtgccgggattacaggtgtgagccactgcacctggccataaattattctttaagcttcaggggtcattgagaagaagagatggaggctgggtgcggtggcttacgcctgtaatcccagcactttgggaggccaaggtgggtggatcgtgaggtcaggagttcgagaccagcttggccaagatggtgaaacccgtctccactaaaaatacaaaaattagccgggtatggtggtgggcacctgtaatcccagctactcaggaggctgaggcaggagaatcacttgaacccagggggcagaggttgtagtgggtggagatcacgccactgtactccaacctgggaaacagagcaagactccatttcaaaaaaaaaaaaaaaaaaaaaaatagaagaagaagaagagatggatatcttgtttcttgtatctttgtctctgttaagccactagataactttagctgaggagagaatgttgaggtggggggtggggtgtgtggctgcagagaggagcaaggcatgctccctccagttcctggttcccaaggggcacaagatggatcctgcctaggtctacaggtcccattgctggggtacagaggggagacaagattgcggctgcaggctcgctggggaccaccccaacatgaacaaagaagtcatgtgttagacccttcatctgggggttaccctgaagatatagccaagattcacaaagaaagacccaccgaggcttctgagagcagtttgggattgagtctctcctcagcgggggtctggttcaggctaccccaggcttgcaaatagggggctagatggacagaagtgacccaccccctacagatgcagggttttcatcgaagggggtgcttgctctccacttcgtggccgaagaacagccatctcaccctgagaagtcacatgtgaaaataccttcattctctccttcctccagaactagaattagaagggaagagcagcgagcaggaaggatgtaggagatggaaactcatgtctcccaccttcttagctgtggaaaccccaagttctagcttaggaatattcaccttatagcagcagttggcatactattgcccacaagccaacccagccagctgcctatttttgcatataaagctttgctgaaacacagctacacttattcatttatgtattgtccacagttgctttcatgcatcacccacagagttgggtagttgtaacaaagaccatatagcctgcaaaacctgaaatatttcctatctggctctttacagaaaaagtttggcaacccctactttatagggttgttctgaggataaaggacataattcatgtaaataaacccttaccacagtgccaggcatggaataagcatttactaaattccagtgattcataccattgttgaatccatcagtgctcaacaaaaataataatagtaatagctatgatatataaatttgaaggattcttcttatcgcccctcataaatagcataagtatgcaaggttaagcttcagaacgcaatgatgccttgctttcctggcgtctccactgggggttaaccaagcatagtgagaaaggagctctgagtgtgtgtgagtgtgtgtgtgtgtgtgtgtgtcttgtcgggcgctggtcacgggcctccatggctggacaaccatctgctgagctgtgcaatgatgacaaatccacaatttgaacttcatttctctttgccattggctcttccgccttgcaaccttcacagtaatgagagattggtacaaataagtctatggttggtcagagaaaccagaattaatcagaactgcccattaaaaaaaataattgcctttatcacctgcactgaatttagggttcctagagtttggctgtgatcctgacacaaggtgcatggatccaaggtatcagggaagtcctattatccccaatatcttcagtctggagagaatgtggaatgatttgtctcttttaataagatttccagaccaatttctcaagctgatagattctactacgcctcaaacaagactcctatatttcgggacacttctctgcattcgattttctgggtcactctctcataatgcccagagggctggggaaggttgcaggcttttctaatcctaaatcagagtcatcctttcacttggatgccctaatttgtgagactacagcagcagcagaatgggtgaattcagcagggtgatgtgctggcaaatgtggtgtttgagctgccagggatcatcagggtctctctgcagcccgggacactgcatatattctagccatgggaaataagagaaagaaagcaggggggccatgttttctcttcccactgaccctttggggctcagaaatgactctcatcaataagaaacatcctctgtggtttagctcaagactgtcctggtgttcaagtgctgtagctgcacctgaatggatgctaccattttggtttgcttatgttgtgtagcaaaaggtgcgaaaatgcattggggtttcttcttgaagctccctggattcaaatcgtggctctatcactttctagtttgaatggcttggctacatctcttagcttctccagtttgttatgagtggctgtgaattttaatgtctacttagcatagggatctgtatctagcaagtactcaattaatgtaagctgtgattattaggcagtatgggggagggttcctcaaaccaagatggataaatagatgatttttttcctccacttagtagcttttatgaaaatttctctttaggataatactcaaaggactgcccgtgtggaaattctggatcagccagcttggggtagctgtgaagatgagtagcatcctagatatgggatactgcatgtcaaaatacagagatctgtgggttgctccgatgagctgaatgacccagaagataaaagaggaaggttgagatcactgtagaagcagtgaggtataaaaggcaactcagtgtgtcacataaccctgctcctaaactctgaaatatgccataaactcataatagcatgtaaaatgcatactgtgcatgtatttcttgcagaaaccagcaagaaactgagctcggctccctggctcacatagacatggaacagagatcacatctgtgagtggaggagccagacttttcatataagcacgtaagcatctgcgatttatacaactcctggggagggaaagcttatggtttcttaaggctcaggaaatgggaattctaggaagcctacttgcctctttaagatcacgaggacgtagctgacctaaaggccacacttaccctgaatgcaaccttgacattttcttccttagatgtaaaacttttgaagttggctgatccaagaatagattcaaattcttcagccaagagtctagaccaactgactttttccacttcattgcctagtaagtactctctcctaccctttcttttccagtggtctgagggtgaaaggtgatactgcctgaagggagggctttgccactgcagatacatacaggtagtggcgatgaacacaccggggagaggaagtcagtccagttgttgttaatgatttagaaataatcatgcttcttccaaaaaaacagaggggacttttgttgtcttttgtcagaacaagttaaaccaagcaaaggttgtgaagcctgtgtggatagccctggaacagctgccatacattattccacctagtgctctccatggctgtttgggccatgaaaagatgtccttggggggtgcaagttcacgtgtgatatataacaaatgcagaggtagcctcacgcattaaacgtctttttcttgctgatggaatcagaaagcttgttatcactggaataaacatgctccgatgagttgaatgaaaactagcatatgggtctatttttggaataaacatttttagagcatatttcagtgcaccttagttatgcctttcttttattaaaaatactttgataaaatggaaaggccaagtaatatcatcacgttagaaataaaggactttatttattaaggcccctgcgacccagagtgaagaaatcaatcccaggccacctaaaggtgaagtgaattggtattttaaagagagaaatgtaagtttcctgaattgcttttaaaattcagcatcagtgattataaaattcctttaaacagattctataaagatccaaaaatatataattggctttgatactatgtccagttaaggaaggcagactgtgaatgaaggcataaagaagacagggacagagggagaaagagagggagagagaggggggagagagagagagattcacacatctctcctcattgtatccttccagtagtcccatgaagctccataatacaatctccacatagtgggtggaaacttactcttaaaacagctgcatcagagtttgtttcagggaaggaagggttggagtttaggaacttacctacagaagagtcttggggtgggaggcaaggctcagagcaggtttaagaaagacgtactaaggagatggctagattttgcagcttaagaaaggaacaacttttggggagagggtggaagagctgagaagggagggatgggaaaggaggtaaatgggaagaaaatggtttgggcaacagggtcaggggaagatgtgttactgctagtgagagctgaggaggcaaggtgaggcttcagaaagaggatgtgtgatgttcaacttgaagtcatgggcattgctgggatatgaagctcatatctctccgactaaagcctcagctgaaacttggaagtaaacatgagaagacaaccccctcagaattctcagaaatgttggggatggacattgggttttcccataggatggggagtagggaacagagcaaattttatttaaatcttcaaagacagaatgaacttggctaacatctaggttatagtaatctaacaaatgataacattaagacttggagaaagtaaaggaactggctcagggcaacacagtgagtaagtaccaaggctacaatttgaactcaggtctcttgaccccaggtttcttttttactgttacccctaccattctggtggggacagaaacagagacacagccccttgcaaagtcagacctgaggctggctgagatgcaggttgggtattttgcatattttgctggtgtgttaggctgtgttttcacaagcccagactaaaaatggggatattaggagttgctatttgccctagaggcacaatggcagcaagagacatctctgaaatagcaccctgcttttctcctgggagaatgaggagcttgcctctctcacttccatgggaatccatcacagcccccattatccttgcactcaggcaccctcacctttccaaaaggctttgcatccctgatctctcaggctttccacagtgggagccccagaacagagcaactcagcttttatgtaagttgtggactcttatttgttttaaaggaaagaaacatccttgtatgctccatacaccaggtgccatagcacattcataggtctcaggggttaggatgtggacatctctggtggggccacgattctggctaccacacagccccaccctttggctggcatgcaggatctcctgagctctctaaacagtatggtgagtatggcatgactgcaaggagggcttctttctggtgtctttctggtggtccgtagagaccacaaagagggaaaagatcttgtcaatgctgttggatgtggttgaaaatgttctttctgctgagtctgagaagtgacagcatgctttgctggctggcgtggttctaggattttaccccgcaaatctgaccacagacatttggagtcctaaagagttagaaaaatctgtaaggttgaatgcagaagtttgaatgcctttattttgagccctcattgatcataattacctttgaacagcaaccactgcaggaatgaaagaaaatttggggctgactaaatgaagtagtgtaagattctgagcaggggcagatttggccagcagtgcaaaaaaaataaggccctgtgagagcttacaccctcttcttattttgctgcagcttacaggtagccctgcccaatccccaacgtacgctcttatggttcccaggcaaaccacaggagatggcatcggtcctctcaggagtgacctagcaatgctcaggtcctaaggcagacctgtccatgttgccaggctgggctagcttggaggctgccttggcatgagcacgcaggcagacagatgctgacgccgcttcaaagaaccgcccctccaggtgctgagggcggcttttctgatgctcatcctgtgtcattgtttattttcataaggcgcccagctgctgcggtgatgatatttatatcaataagtgctctattcatctgccggtttcagggaatgcttgccagctgcgtatggcagccaacctcagggtacttctgagcctgatgtttttgcatttagagaatcagttctcaaactctgtaccaacatctgggcctgaaagattcttcattcacccaggacccaccctgaaagggggagctatagccaatgaccttgacctttgtttcaaaggttttatatgtcccgaagtgaagttctttgaaagtcatcctctgtgcctgagctctggttttgcagaaagggatgttgaaaaagagaagagcaaacagggttttgcaggccagacttcatgcccaggctcatgagctgagttcattcttttatttcttcagccaaaagcgtagggtggtgatgccttcagactccaaaactctgcagggaatgttccagaactctctgttttatgagaattcatttattttttatagttatctcagtttctaaccttctattgctcaggccccaatcattgacattatccttcattcctctttctttttttgacagggtcttactctgtcgccctaggctagagtactgtggtgtgatcacagttctccacagctttgatctcctgggctcaagtgatcctcctgcctcagcctcccaagtagctaggattacaggcatggaccaccatgcccagttcatttaaaattattttgtaggactgggtgcagtggctcatgcctataaccccagcactttgggaggccaagatcagcagatcacctgagatcaggagatcaagaccagtctggccaacattgggaaaccccatctctactaaacatacaaaaattagctggctgtggtggctcacccctgtaatcccagctacttgggaggctgaggcaggagaatcgcttgaacccaggaggcggcagagttgagatcgcgccactgcactccagcctgggcgacagagtgagactccatctcaaaataaaaattcttttgtagagacagggtgtcactgtgttgtccaggatggtctttaactcgtggcctcaactcctgacctcaagtgatcctgcttccttggcttctcaaagtgctaggtaagattacaggcatgcctggcccttgattcctctttctctctcttattccatagtcaatctctctggatgtgttgttggctttaccttcagaatctaccccccagttcaaccaacctcacctgccacctgaattatcacagtagtctcttgtctgttctctctgcttccatttcagaaaccactcttccccatccttgcaccaacaatctattctcaacacagcagccagagggatgcttttattaaaaaaggcaaattatgttgctcctctgcttcaaacatgtgcatggctctctgtttctctgagagtgaaagcccaagttcttctatgtcttccatggccctctgacctcaccttctgctgctttccccacagttgtgctgctctgcccatggcctctgtgctgttcctcaagggcaccaggtgcatgcctaccctgcagcctgggtgcaggtgttccctctgcctgtgatgcccccctgagagtcacatggctcactctctcacctccttcacgtctgtgttcaaatgtgttcttctccatagggcccaccttgacaatcctattgcaatgacattctatgtcccagatccaacgttctgatctttactaccctgccttcttgtttgcctttttccaaacactcgtgtcagccttctaacttataattgagcacattagagaatgtgtgttgcttattatctgtctcctgctttagaagagaagttgcatgagagatggcaatttttttttatgcctcgctttgtctgtgttgctcagtgatgcattccaagcacctagaatagcttccagcaaatagcagatgcccaacaaatatgggttgcctgaatcaatagactctctccggaacgtctctcacaggcacatcccaaggtgcactcaatttcatcccctgttcatctgctcttctcgctgccttcccctaccttcctgactttcatattttccccagttatatccccagttgcctaattgcccagactcaacttcctgccattatctgcaactttccttcttattcacctcccacctgcacctgctccctaaaccttggggacttaagtctggaaatgttttcacgtccaattccagtcctctcacctcctggccacttctgcagttcagataactacctttattgtctacacatttgcaacattctcctccccggtctcctggtttccaggtctttcctccggccttttacctgcactgatccccagacctggctttctttttattcttaccctttttttgcaatttttattttttttattttttaagagatggggtcagccagatgtggttgctcacgcctgtaatcccagcacttcaggaggccgaggcagggggaacacttgaggtcaagagtttgagaccagcctggccaatatggtgaaaccccatctctactaaaaatacaaaaattagtcgggcatgttggcacacgcctgtaatcccagctacatgggaggctgaggcatgagaatcacttgaacctgggaggcggaggttgcagtcagccaagatcgcaccactgttactccagtcgggatgacacagtaagagtcagtaaaaaaaaaatgggttcttgcactgtcacccaggctggaatgcagtggtgggatcatagctcacttgagccttgcagtgctcaagcaatcctcccgcctcagcctcctgagtaactgggactatagacacatggcaccatgcctggctaattaaaattttttttttttttttttttttttgtagagacagggtctcatggtgttgcccaggctgggcttgaactcttggcctcccaaagtgctgggattacaggcatgagccaccatgcccagcctctagacccatctttctaacaggaaccctggctgtgttataccactgtcaaccctccagtgtttcaccttcctgcacagaaagtatttctaactgtgctcctccaaactccagtggtcccacaaaggactgacccctctaagggcaccaggagaaaatgagacagcagtgtgggtggaagcccaacccctgcctactgcttcatcatgagcagcttttggtcatccctatttcatacattgggcttgcatgaaagcttttattcatagaaaggattctgtcgcttacaaagtagaagtctgaagcttgctatgctgccaaccaagacccaagctccttagcctggcacagggacctctctgcaagctgggctctgctgcatttttcagcctcactacattcttctcctcctgatattcctctaggtcccagccacactggaacataaactgttccgcaaataagtctgtgtatattcatcccctgcctcgcctttgcctctgctgttccctctgcctgaaatgccttttcccagtgagttcagcctccatatgcctaaagctcctctgccttcttcaaggccaaagtcaccttctttttgaagtcttccctcaccctctgggcagaattcattgctccctgctcctggccaacacagcacttcactgctgacctctattataacacagccacatgaggttgggacaatgtgctcatctgtctctggagcaagaccatgcgcttttggagggctgaaactatagctcaggtctgtttaaaaaatttttaaattcccatccaaggcctgcacaaggccagctctcatatgggaattcaatgttactttaagttttatttaaggcagtgaaaggataggtttttaaaaatctgaaggaccattctcagctcttccaccccagaatggctgccctggcatagaaactgttccaagatacacgtcctgtgtcctgagtatggggatatgctgtaggcacgtgatgcttggagctatcagaacagaggggctaaggcaggaagcctgccggggaacaaaggtcaaccgtgaggaactggggcttggtggggtggtcagtgggtaatgtgtccaaggttcaagtcccaggctctgtctgtacaggctgcattgcagagggggaagggaggtgagtgtggccgggcatctgggtatttttcagggctgcaggtgctcagtgctgggggaggaagcctcctggctctgcaagatctgtgtgatttggagcaagacaataatcaatgcttgtgagatggagcaacagagtctggtcccgggcggggagttggacaaagcccataggcagggggagtctttgctggaggtctggggggtgacaggaccctctgtaggtagcagaatggcttgtctgatgctcgtggccagacactgcttattacaagacagctggctggggcagatgtggcaggcaccggctgtcaagggatctccctccaggtttagagcatggcccccctgacccacctagggcttggcttggcctcctcctacctgggcagtgtccatctcattcagcatcaccacagaggagcagttgtaatcgaacaccagcctccagaagtctgccacggtgttgggtagagggtgctgggtgaccacgaaggcggcaggctgcttgtggctctgacaaaggaatgacacaggcttcgtaaattacacatccatcagtgatattctgatgatgatgaggcctggactgaggccagaggctccagagcctgccaaatagattatacaaaacacctgcctgttcttttatctctccacgccctggcggcaaaggggaccttctcataatgaacacaatctcctccaaactaagacatttcattaggaaagtgtcactgggatgggattatccaaataaattatttatgcctcggagctcagcaaataatcataattacaatacgaaatgaaagatttcagatgcagatttgttgctctactggtcaagacacctcttgggatataagggattggccgcatccctgtggccacgatgctgggcgaggttttgggtcggcctgaggccgagattctcccaaaggggcaggctcccttctgcctccaggctggagtgaggggctgagttgccctggcaaggtgggcactgtgtcatgtgagtcaatggggcagtggaaagtacacatgcattattaatagtccggtagacctggggttcaagtacagctttaccacttgtaagttatgagtcatccatctgtccatccatttgcccatttattcattcatccattcatccattcattcaaactttgtagagtgctttttttttggcggggtgggtgctaaatactggcaagttattagatgattccaaagctcatgttcttcacctggaaaacggaaatcataaatccaaaggaatgatgtcacacagattgaatgagatttacgtgtgaaaaggccagcaaacaagagccggaacgtaagcctactggcagggcagaaacacccctgactttgttttacgtccttggcactggtattgtcgctggcacatgctagacagtgccactccagtgaataaaacaataaattcagtcccgtgttgcagatagggaaacagaggcccagagaaaatggcctgggcggggggggggggggtggggtggtctggcagcttcatccagggccctatttattttctccccaccctgaagtcatgtatttgaaaagattgggaagattctccacttcatcagtggctcatgtgcttgatatgttttctcaagagatgatgatggtttctgtgggagttacagctgttttcagtgcagttacaagcaagagggaagagggcaaagaccctggaaaaagcaggacaaagccttgcaaacatggatatcatgcgtgcattggctgggggggcccttcttccgagggccttttcctggccagtagaatgttcagaagaggggtctgggtgggcataggcaaataatttattttccaaaagccaaactctctagctgtagacagcatcaactttgagccatttccagacatggaaaaacattgaggctttgagagttaacagacttggggctccaatccttggctcccatttctgagctacttgaccttgagcaagtgatgaatgaaaatactctgaccccgaggacctcatcagaaaatggggatgagaatacccacatgcaaaatgggacagtgcaagtccagggcccgacatggtgcccaacactcagtgaatgttagttttcttttctttttccctgtctctgtgataaacgctctattaggccagcacgcctgacaaagccttatctgaaaatatgttcgagatccgtgctcctgccgggtttcagggatcagccggcaatccatttcatggataacatcatcctttaccaggggaaacattaaaaattaacccagaggacttcatatttttctgctaggagcaaagctgctatggttaccagataatgcactgactgggctggaatacagataaggacgacttttttttgtttttaatatcagaaaggcaaaggccccagtgatggctcacaggagaaatgccctgtggacaaagagaatacaatcagcatcagagcttggcagaaggcatttgactccaggcagtatctaacctattaagtagaggccaggagcttatttgatctttgcctggatgaggaaggcagggagggggtgttgggagaagtgggagacaaagctaggaggaaattggaagtatgggcgcacccctaggctccatttctcatcacactcacacacataatgcacacctacatgcacacatacacatacatgcgctcattgactttagaaggctctaagctataagctaatgccaaaggtcttctctccacctctagctacttgctatgaccaagccaagactccctgattctgaacccagagctagggtttttacagaggatatgggcactctgtggacagaggccagggcaggcccctagagagctgggataggcattgaccttccatcatcaccctcctgcctctaacacccagacccttgggagaaacttcaagaggattagaggtcagagaagttgttggccttgaccccaggagaaagcatcccatgtttctgtctattctgagtgagataggagggccacatgggctagatggatgtgaactcagatgggctggggaggggaagctggaagggctcattatatcaggcaatggtgttcttggttttgagcctcaggaggtgagatgtttgcctcttattggatccaccaaattgcagggaggctcaagaaatgaattccagagtgtgacccaggagctctgtgtgtgggctgtgccactagctccctgggtgaccttgagcaagtctctttctctgtctggcctctgttttctctgctgaaaagtgcatggctggtagtagatggtccatagttccttcctactgcaaacacctgtacaccttggaggggaagtgatgataatcagaagtatccgaaaaacgcaggggagaagcttaggctcgctggaccaggaacatgaccctaatcccaaaccagggtagggtgaagccccttcctggacctgatgacaagaaagtggggggcagtggccctcacaggacagccaggaacacagcccgcttccaccccatgcttgttttactgcttcccactactttcccaataaccatttactgagcccctactgtgcgccatcctcatttttgtctctgctcaggagttatctggaaccttcatgggagctaccagagggcagaacctgtgtctgcaccgtcttgtgttcccacgctcaggccaaggcccagcacagaaaatacctgctttactaaacttcaggctgagagtcggctctgtggggaatggaagaggttgctaggcaggcctgtagacttgccatggtgacacgggagccaccttacgcttctggtctattctttccaggctctttgtatgagaaaaggagccaagagcccaccttgtgtctaggtttggaccagagcctgcaggggaacaaaggtccttgggactagtagatcagaagcagggggggctggctggtggggtcagggccctgaggtccagccacctccacctcaggaagaatatttgccctagaatgccagctaggagctttctgcccgggctcggcttacatccatcagtgctgcgttgatgtaattgctggattctccgtccactgagataaggaagggcaggcagcggtccagaggcagcacgtccatacttcgattcttatcatggttccggggcaggagcccaatgctgcagtcctcgggccgcacacggggtgtcacaatgttgagggtctgtggggcacaaaggtgaatagataggccctgctcatttggctgcccctgagcaaaagagacagtaatgttccaactcagcctaactcgcctatttccaccctctaagcgcagccccactctccctttcccgggacccatttctcttccacggtgatgttctgtcctctcctgctccctgctatagggtgtgtgagctgtgtgacaccttcaaaacgccaaggctgcagaagcagcgcatccacacacaggctcagacacagcctcatagtacctgccaaccagatgaactaagtcgttcagctcagccagtgctgctttaaagggtgggccagccaggagggcatacagaggggtgggggtagggaatccctactgagggctaaacatcacttgcgttgtcatggaatgggggaaatgatttaccagccctcttctcagagagaaagctgtctgagtatggaaggatgcctagatgacctgctcaggatagatgagagacctccgaggggcaaaccctaacaggtctgggaaattgctgtgtttggactttgccgagtacatcttgcaagtttgaggccagagctgaactgctctagccaatggactagatgttacgtgcaatgaccagtgttctgtaccctccatccttccctcattcagctctctgtctctacttcagatcaataatggctatttgttttagggattgctaaggtattggcctgcctgggatatctgcccgtggaacaatgggcctggcatttgcccactgacttgaagcaagacctggagcttccttgctttctcatacctggttctcagctcctgttgcccaggtgtaattctgacactggtcttgggataaagggctggactctggctttatcttacttagtgattcatgtccaggctccctagaccaatcaatgttgccacagctctgaccgcatgggcttccaggtgtggatctggtatacctgagctatgttctaggacagtacttctcaaagtttaacatgcatacaaatcactcagagatcttgttaacttgcaggctctcattcactatgtctgggccaggtccgagattctgcatttataacaagttcccaggtgaagccaatgctgctggtctccagactgcaggttttaaaattttatttattttattttttatgtttttgagatggagtctcactctgttgcccaggctggagtgcagtggcacaatctcggctcactgcaacctccgcctcccaggttcaagcaagtctcctgcctcagcctcctgagtagctgggattacaggtgcatgccaccatgcctggctcacttgttttgtatttttagtagagacagggtttcaccatgttggtcaggctgcagaccacacttttagcagtaagagtctactgaaaaattactgagaggacctgagtccctccagggatgaaggagcatgaaattcacacctgtttgtataaatttgtctccattcacaacttggactagaactgaataagacctcagttaaaaaacatattcacagttaaagacaagtaccagcaatccctgagtgagtgtgtagttgctcatggctgtgcattttgtgttctggaatagattctgcagcttcctagagaagcagacactgaaagtgcatagatcagttgtcccaaagaaaaccccacaaatgtgcacatagccactgaagttggttgggttactgttacggactaaatgttttcatccctcccaaaatccatgtcgtaatcttagcccccaatgtgatggtattaggaggttgggactttggaagacgtttcgatcatgagcatagaaccctcatgaacgggattagtgctcttataagaagaaacatgtagggccaggtgtggtggctcctgcctgtaatcccagcaatttgggagaccaaggtgggaggattccttgagcccaggagttgaagaccatcctgggcaacatagtgagatcctatctctataaaaagtaaaaaaaagaagaaatgtgagagcttgctgcttctactttccaccacgtgaatatgcaacgagaagacggctatctgcaagtcaggaagtgagccctccccagacactggatttactggaagcttgatgctgggcttctcagcctccagaaatgtaatgaataagtgtctgtcatttaaaccacccaatctatggaaatttgttataacaacccaaactgactaagatggtcaccgagcctgggatttgctcatacctgaaattcatctttgatttggctggagtttgtctgggggtccagcctgctgatattgtagtagagagaacggaactcacacacagggatggcagtgttgccacagaggcacgcttccaggatggcatcgtgcacaaacacatattgctcctgcaaagtcagaagagagggaatggggtgccaggtaagaacagtggcctgggaattagctgtccacatttagtgttgtggctatgaagaatagacatgatttatcaatatattacaggatccttactttttatactgtaacccaaagggccaaatttccatgtttcctaatgatcacctgagctatggtgggtcttgtttctgatagaagatgtaatagcatagtcatgataaaatgagaaacttctagacatgctgtcagcaggcgctcttggtgtccagcccatgtcccctcagctttcacctttacctgaggaaggctgcttgctgcaaacacctgtgattgtctgctgaaggcagaggggatacttgggctgtgtggaaaggaaccctcaagcaatgacagatggagagttgaggatagaaatctaagaaatctctccctttaggtggaatcacttggacacgcatgtgtctcagagttcgccagcagaattgggttccagttgtctacagtgtttaacaacttgttaaagtagcctttgtttgtttccttccctgctctgcctcactttcccattcaccagccactgtgtcttgggattaccttccaagcaaattatttgccggcaaatctttgtctcacgatctgctcccaaaacgtgtcatatcttctcctatctcaattctttgtacctgctgtactctcctcctgaaactccactccctcttttccatacctttaatgtttcattctttctggaaagccatctgttaatccaccaggcagaagttggtgttacttctaggccccagataaatgtttgttgagtgactttttctgcagaacttggtcagtttctctataaagagtacttttccagatgctatgtgatgcatctgcatttgaatatgtctccccatatgtctgactgcaaccagcaagcctggcttctgcatgcatggacctaggaatagataaagcagccctcttggctttagtgctagaagcctgaagactggcctgtgtgagttagctcagagcctatgtgtgtaaaccaatcaatggtggtattcactgcagattcagagaggctggctgtaccaaaaccatgggtcacttccctttgcaggattgatgatgtgcatagttccctatctgtcccagctctggtcgcccaggcacccagagccttcactagaacagaagatgggctcgttacaggaatgataagccaaggtacagagtgggataggcagaaaaggctgcttagtgagagtgtggttctggcgaaaaagcagaggcctttgggggtcacatggaccgaagttctaccacagtctggtatgtgaggtcttagggacacaatttcttagtttcttcttcattgataaattggagataatactaggagctacaccatagctggtttggaggagtagaaacaataccgtgactagaaagaatgtatgctgcctggctcacagtaggtacacaacaataaagattaattcctttcaatactcttaggtttgggctctccaactgcacagagagttgcctaaaggtctgcttctcccttgagggcagaggctgtgtgttacatctcttgaaatgcccagcacccagcttaagtactcaattactttgttgattaaaccattccctgcagtgactgaaccatcgcttggcacgtagtggtcactgaataaatgccagtccttctctttccttctctatcacttcacccaaggcaagaatactattccaataatccccgaaatttgtcattctgtccctgcttggatggcctcagagatggagaactcaccaccattcttcattggtggaactgcctgcactgtagacctccagggttggctggggcaccctagcttctacagtagtctcaccatagtaagccacgtgtctactccctcctgcttctctcacacccaggtcctttccataggatgcccctacctatgtgtctctccgttctatcatcatgtttctccttggtcagggctacaggtggccaactgtcttggccccctaggactcacctctgtctgtaccaggttgaccctttgggcccggagctcacgcacgcagttgaagatgtccaccaccccttcattctcggccatgtcaagcatggtgtcaatggcaatgaagcagccagtccgcccagccccagcactggaagagaggtatggtctgtgttaaggatcttcatggggggaacctgccctggggaggcccctagcattcagccctatccccaagggtcctgctgggaggctctagattatgtgttcccacatttcctttcttaatatgtatagtttgtaatgcatgtgcaaaccacacatatacatgccattgccttgtctgatggataaaataatacatccatatagcataaaacacctagcatggttcctggcatgctggagctgcctcatagatatgtctttcctattttctacccttcttttctcttcttttttcttcttcagcaaatgggttgacggatggaagcaaagaaggagaggagagagaacagaggggagatgaatgacaggacagaaacgagagtcctctgagctgtccccaagacagagagtggttggtggagcaccacgttcaaaggccggcatctggctccacctgcagctgttttcgcaggatcgtgaagcaagagtgtcatgaaactggagcagctgaccgtccggagacccttgtcagggatcaagtttcttgatacatacttacttgatttctggtcactagtggcttctttaggagaatctcagaccaagtataaaatggtaggggaactcaacgagactctatgggccttggccagccctttctagatcagtgctgggctctgaaacatcagtgctgaccaagaggcacgtaagacatgtgccttacacatgtgcagttttggatgggaaggccgggcagcctgtcaaggaggcccccttccgctgcgttttcacatcttgcctttctcatggaaacaagtgtctttgtctaacaatgtagatgtcaaaagacacacaaagaggaagagagatggaacaagacaaaaaagcaatattggctcatggtaaatccaaggggcacaggccagtgcggaccactacctacaacaatttggaaagtacacccattggaagcagagtcttcattcatgagaaactttcatggtttgaatgaagtctgacttaagtttgcttcagaacctactccccaaaatccagatgcggggactcaagagacttggcctctgtgtctgggagggagtatagggggggtcactcgtgtttttttcttcaatgttcatattcaccatgctttagtataaagaatcagcccaatttggttccaaattttggaacaactatcaatcaatcagcggtgaccaagttgcctagtgtccgtttgtttgttagcttcagatttctgatgcttttaacatacctccctgcagggtccttgtgaggacaaagctgtgtttatttcatttcagcatcacatagtaattgaacacaggatatttgaaaagaccccctaggattaaatcctggctctattacttattagctgcatgacctcgggcaaatgacttaacctctctgggtttcaatactcatctataaaatgatgttgataataattaaaatactcactcatctataaaatgatgttgataataattaatagatccacctcacagcattaatagcacaatatgtataaattggatgaaattacaattaaaatgcataatgcatacaaattgctttgtgcctggatacatagccattttttattgagaaattattactattatattcaacaaatatttattgaaaatctaagatgcagtagatgctggtattaggagtgggaatatgaaaacaaacaaacattgttcctgtcctgaaggattaataaataatctggggagggggagaaagaaaacattaagaggaggcagagaataatgatatattagagtgcttactatatgtcaggcattctctcttaggcacttagccaacccatttggtaataattttcagaatggccccaggagtgggtaccactctgctcagatgcattaagatgacctgctaaggagacacataccggcgtagagccatcatgcgccgaagtcctgatgataaacaaacatttgccattgtctttctttctttctccctaacccttgatctgggtgctctttgggatatagagatggggggcattaatgatccattgccctttgattgctatgagatataaagcaaagcagaaaatacatgcaaaacatttagagagtccaggattacctcctcatcctcacttgccttatctgtgaaatggggttgtgtagctactattgctgggaagataaataaatggatgctgtatgaggacggggctggctctgagacatccacagcttatggagtcttccatggtctcttgactgacacaaactgccagggcagggatgtgataactcaagcatccagggtctgaaaagatgggctgccccaaggtcatattggaagagagaggcgttgggaaggagggggatgccagctggccagccttcaggtcaggaaggccatcctcctccaattctggacacccttgacaggatacttcatctccatttgggaggattcaaagacatgccactcattctcaatgtgactttctaggtcagagctgaaaatatctcttcttcataataaggtaaaacctggtgctgtccatttctctctatgagggaccctgcaggctggcaagtgatcttgaaaataatatagaaatgaaaagaagcatgcttccaccaaggcgccctgctgccatgtcaaggagctgagggcaagtgtctggagaaaagcaggtgaaatatccccactctgtgtttacctcctcagcacttgagtttttgtatctgtaaaatgggaatgttaataatgcccacctctccagactggacgagaagtaaataatgtgggtaaaatgcacgtgacagacccagcagatgctgccagtgttcagcctgcctccctggtgactgacttcttcactgttttcaggcaacaacagtaacaatggccactactgctattccttttgttagctgaccttgtgaccaagtatcatcagaaagcactgggcatgggggggacacaggaagaggagtctctaagagtaaagccactagaaaagataacatgtccctcccaagaaagccgagctgcagaggcacactagggtaggtggaggactttttctttttttttttttttgagacagagtctcgctctgtcacccaggctggagtgcagtggcgcgatcttggctcactgcaacctcccgctcctgggttcaagcgattcctctgcctcagcctcccaggtagctgggattacagatgtatgccaccatgaccagctaagtttttgtatctttctttagtagagacgaggtttcaccacgttggccaggctggtctcgaactcctgacctcgtgatctgcccgcctcggcctcccaaggtgaaggacctttgacttacctgcagtggaccactatgggcccagcttccggggggttgaggaacttgacctggcggacgaagcccagaaggccagtggcatagcagggaacgccgtggtcaggccagctggtgaagtggaagaggcggagctcccggatctcatggtagcctttctgaggaaagaacgggcctctgttcttccagctgctgccctcgcatacccagcccagcaacacgtggagccatagctgctgcactgaggaacctcccgcagggacagggccctcacagtgtttgttaataggtgttactggatagagcgattctgtaatcagttacatttgggaaatatgggattgttaaaacgaaaccgatggctttattgcaggatttctcagagtcttgagtgtgctcatacacactctgaatgcccaagagggccacagagcaccctaggagaccttcttttgtttgcctaggggatcgtctttgacaaatgtttcataggaggtgtattgagtacggatttaaagaaatgttggccttaaggaccaagtcagtccaaattgtttccagtggaatctgaggcgttcagtgattgaggtctgatattctgtagtgttccagccttggctgtgatagtctgtgtggctttcaaagtttatataacttagtactgacttctttattaagtagattcttacttagaatgattacataagatgcgaaacaaacaaaggcagagcttctctgatctgatggagacagagtggggcctagagctctgagcggttcccctcccctttcacacccctccacccctcacagagacacactccgggcccagtagtggttttctgaccattccatggccaggtcacacttctaagccttcgcttagacagttcctgttccctactatttttctacttagcaatctcctgcagatacccagagaacactgaataggaagagtctgtttgattattcattcattccttcattgaaaaatcatttaccaagtgtgacctgtgcccagccttcccagccttgtgctaggtactaggaaggtgagaataaaagccacagctcctatccctggaacagctcatggccttgtcggggaggcagatgcccaagtgggtaattctattgaagtggataaaggagtgcctgctaacctgatctgaggagaagagaaatcccagaaggctttctggaggaggtgatgcttgacctccatcttgaaacagactaatagtgaaaataataactaacaaacattaactaagcatttactgtgtgccagtcactcttctgaacacttcaacatgctaacttacttaatcctgatataaatccctatatttttatctccatttgatggatcaggaaactgaggctaaacaaggttaagtgacacacccaaggtcacagtacaactcacaagttgtaaagggaccatgtgaaccctggctgtctgtctccacagtctgcactcttaatcattctaatatagtgatgtgtgagtattacccagttgacgggagaagaggaaggaatccaaggcagggggacagcatgggcacaggcctggggacagggcttagcatggtgtgtgcagagaatcactagcaacccagggcaatgctagaggcaagtggaagtcaggccatgggagaccacaggcctgggggtgcaggagaatagatgagagctggatcccagaaggccttgaatctacattaaggcctttggactttatctcaaaggcactgggaagctacagggagattacacagacggttccacacaagaggaagtgcatcattagacttgcattttaggaggctgcatcctgctacatgaaggatggattcaggtgggtggatcgggggttgcagagagggcactattggtgcccactcagatccccatcactgggccagtggactcattgccacctgctctgagtcgtggctgcacacagctcacagttaccctcttctgaagagaactgttctcagctgaacaggaacccccctcccctggggtgtggctgggtggggcagcatccttcagtgactgactgatagtagagggagagtgaccaactggcttgccacttgctcagtctgcccaggactgacgggttgcccggtacgtgggactttcagtgctaaaaccagtaatgttctgggaaaaacagaaattttttttacccttatggggggcacctgaggcccctttgcctcaaggttggaccaagtgtgcagtaccattcatgttccagggctcccatggggttaggtggaagcaagtctctgctgaggccacttcctcactcagctcctttccccaccccatcctggctctctcactgccttccccctgcaaactctccctaaacacatgagccagggcacccaaacgactgctgcttctggctctgcttctgggaaacccaaactaacataggggcaggactagaggcagacagtcctgttaggagggagaaatcagatgcccagatgaaggcagtgatgaatgagctgaagtgagagaggagaaagcttcaagaatacttggacttttttcacgccatcctccaaatcaattcagtcccaagaagccttccttcgagctcttcccacctgtgctgtgatgatttatcaaggatcctctctccccgatgcgtctgtgctgtcttcaagggcagacagcactccctgtttattatttccaggttcccagctcaggaaccgattttgagctaaaatcgcaggtaatgtttgctgagtgcctgcctgcatgctgtggagaggctggctaagcccagttaatcctcagaggcccttggggtcttttaagggcatctccctgtgagtaatatcttccctcgtggttgtttaaaagacaaagaaaatgtaacacgagaaaggaccttaatgcctcaacatggtttgctagctgcaattcctcaaggcctccctgcccgtgtcgccagtcactcatcccatcctcgggcattcaacacagatgtggcagatgagactggtacccctgggtcctcttccttgggcctgtgcttccaggcctgagctgcagggactgttggttgctactgcctttcaattgtccccttctctggagacacgccctcagctgacaggggctggcccaccctggaggttacccctcagtggatggtccacgatcagcagactgactgacgtgggagcacagaagtctggcttccacgccttaagggggacaactcactctgtggcatagtttatccttggaggttccctgtggatcagctctaggctagacttcactggagcctctgtccttggttggtgtctttccttccctctcctgcttcccactctctcttaggaatttctcctgggagagctcccctgatatacctcatgtttctgaatccttgcctcaggctctgcttctaaaaaacctgacctaaggcaacattgaagtaccgatggtttccttcctcttagtggagggagttcacaggcttcctgactttttcacccgagactgcagattcagatgaaaaagaccctgagactttaggagcctgggggttggagggggagcttccggggcaaacagtatgtcctaggccactctgtatgctggaacagtactgtgtgcatgccgggctctagtctgcagagcagcctgctttggcccttgcaaggacttgtcaaagcctcaagggcacagctctcaaagcatgtaagtccccagtgcttttgcatccttaggcctgtggccacattgtctattaaagtgattggttttagagaaatggaacctatggtgtaatggaaagagaaatgtgttacaggagccaaggtgtgaatcctggttgtaccaaccttgcagctgggcaactttggatgactgatttaaactctctgtgtctcagtttcttcatatgtaaaatggggataataatagtgcttaccttatagggttattgggaggattaactgagttactctacgcaaagcatttagaaaagtacctggtccagtaagtgctcagtaagtgttagctatcattatgatataatagtaatgatagaatagcaattattatgtaacatgttataaatatatttatttgcaatcacatccttgctcaccaagcttgtgcagccctggcctccttttaatgtccagaccagcatttctcaacctcgacactactgatgccttgggctggataatcctttgttgtcggaggctgtcctgtgcattgtggaatgtttataagcatctctggcctctccacccactaggtgccagtaccatcctaacccttctcccccaagttgtgtcaaccaaaaatgttgccagacatttacaaatattccttgggggatcaaaatgcccccggttgagaccacatgccttgaacaggttgagatcactttttcccctccagactgcatgttttttccttctgcctgggatagctcttctttcctttctacccttcactggttcctcctccctcattctctgcccaaatgcctcctctgctaagaggccctctcctaccaccccatcctactgtggatttctatctccatcctttgcatattcctgtgtggcttttatcacaatgtgttgttatttcattgatttgcttattgaattcagtttgccccacctactagatgtgggatccctggtagcaggacccatgtctgccctgattgctgatctgttgctggtgccaagtatggggctggacgtagagcagaccctcagttaccacatgttctggatgaacaaacaagctggctctcatggtggaccggctgcccacagcctccaagaagcttaccttctggactgtgaaggtgcgtatgacgtattctgccaggggctctgtttcaatcagggtgactttaatgtctccgtagacctccgtgtcatctggccagtatcgcacacatttcacctgtggccaagtgagagacagagacagagacagaacagagacaaggatgcataagcacatggctgagtgtgagcagctgtctcatctggtcgtcccatccaaataaacccaagggtgactttggtggcatttcagtccacagggttcacagctggccagggatcagcaagctgcacagggccaagctcactcccagaggcactggagccattagaaataattgtagtaccttcttttgcaaagctccttgtaactttccaatgcattatcacactatgtcatcaaatagaacaaggtgagataggtgggtgttattgtccccactttacagatgaaaataatactgaagttcagaggtttggtgacttgtccaaggccatgtggccagtttggggactgactgagtcccctttctgctctgtcagggtggagcagctgagtatcatcagctgagcaaagatgagaataaaaggtgggaaataggaggtggaagcagaagtggttgggagggggacatcattaagaggtggcagttgggggtctggaaggagaaaggctcttggttgggaaaaggatggtagctgctggactccaagggaagatgcgcagttcctctctgaccctggacgcgagcaagccattccccagtcgactgtttaagtcgcactcatggatgaaaaagagatcatggttttccccttaaaagaacaaaagcatgattaccattccgggggacgccgcacggcctagagtggcatttcccacagtgtgttccgctgggtgctaataggtgttaggtaaaaaacaagaaacaaaaaacaaacaaaaaaaggttttgtggtcaaatgagtttgggaaatgctgtattacacagttaaataggcagctttgctacaggactattcagcttctttctcatgctagtgctaatgtgttttgtgttttgcgactctccaaaaggggcacagaggacgcagcatttcccaaacgtatttaaccgtggaaccctcttctcactaatcatcctgcagactagcatcccatggaacccacttagggaaacactggtatagtgcaacagagcatgggggcaaatggattcattgtttggtcctaacactcagtatctgggtggcccaagaaagtgctgaaacctctctgagcctcagcttcctatcaataatgatagctaacatttactgactgtgtactctgtctaccacggctcacaaagtgttctgcgaatactttacatgtattaattctaatgacttatcaacacaactttatgaagtagatattatcatccccattttgcagacgaggaagcataggaaagctaagaaaattgcccaaggtcaactgttggtaagggatggggccaggatgcaaacccagggcacttgaataataactaggaacatgggctcctatgatggttgtaggtttcggtaatgcacaataagcacctggcacagtgtttggcactagcaggagcttatctaagagactgctttcctccccaaatccaatttagatttatggtctatccatcaagggaatctgtttccaatgggggatatattgtagaacaggctggaatttgcctctgaatccctgaatcctgggctggcctttatgtccacagtagctgcaccctgggcctgggtccctggggaacagtctgagtggagtgaccacaagcactggaatcagagtccagcgtcagattttgtgcctaggttttggctgagtgacgtcagggtaggtactctacccctttaggtctgtttcctcatctgtaaaattgagtgatggactagataagggtggactcatgggtaaagtctcacctggtcctaaattcccattaggccctgagatgtccatacccctttattggattacgaaagcccagattgtctccttcccatcgtcgcagaggccagaattcatctttatgaattatctgtttcttacccaaacaaaaacttacctgcccacattttagttagttcatatgatgtgtagagagcccttttaattctcgtgtttgtacaccttgcctttaaactcagcagcccacccacatgccagagttaactaagtaggcaaaagcaagctgggaatagcagtcccatttctaagccccaggagtagttgaggaccacttcagagagagttgagatggagcagagcaggagaccaagatctgagccctgaagaacatcaagatttagaggtcaggggaagaagagcgggtagcaaagggttggatgctgctgagattgagtaagatgagaagagagaagtggagactggatttgtcgacatgaagggtgcgagtgatattgacaatatcactattggtgggatggagggaggagctacgctgcggtgggtagaagagaacatgagtgaagaaacagagccaccctgtgagtctttaaagtttggcagaaaagagggaacaagaaaatactttttatttaccttttcctttctttttaagatggaaggtactgggcatgtttgtatgctaaggggaacaatttggcaatgagaaagagacttattttgcaagtgagaaagggaaaaatgaaaaaaattattgagtagaatctgtgatccaggcactatgcttgcctttggaagggcagagacatggcttctgttgtgttaggctgagccataggaaacagttgacattcgaccatttgggtcaacaaaaacagccatttcttatagtcaaatctgacagcagaggagaagaacaagaggacagttgtagatacaagtaggattgtggtgtgacaatgagggagtgaacgactgatggttttaatttcctcaaaatatatgagatgacatcatcaacggagagtgagggtgtaaaaagggatgaaggggatttgaagggaaaggacattgcttgaatgtggaataggagtgatgacacctcccttgtaggttgccgtgagggtgaaatactgactaggaggcacttagcacgatgcatggaacaaagagatgttcgagagtgcatctccagcatcctctgcccaggcgagtgcaggagaggcttaccctgcccacttccaccaggtttgtgaccatgacgatgctggcggagttctcctgccagatcattctccaaaagtcctttacagtctcctgcatcggacctgccaacagagaagacagtgaggttagagaatgcaagtgcaaagcagcagctgagaaggtttgtccccccggttggtcaagtctccacactggtgagcaggagtgaggccaggtgatccttgttaagacaccaagtatctgagacacgggcctgagacatgtgagcctgatggggacagattagggtatggatggggaaaggctcattccaagctctcacaatctgcagcatctactggaaatgttggcagcctctcctctcccttctgtcctcctcctgctcagaccctttctaccaactccacctatcaccttatctggactgtattatggcttaagggagttttcgaaaattggtctccagaacctccatgagagacaggaaggcaactggggtggggggtggagagagctgcagggtgccagacgctgagaacaaaaacaggagatgcctgattttgtgcttgacaaatgctggaggcattcctctagggcctcaacagaaaggaaggaaaaaaaaaaaaaaaaaaaaaaaaaaaagaccaggagcagaaaataggctctgacagtccaaagcaatttccttggaaattactctttcaatgtcctgggccttcatcatttttaaaattacaaaagtaatacatgtgtttgatataaaagtttgaataccatttttctatatttatatgtatatgtgtgtatttactgtaataagcatcagacctattatatgcattttctgatgcccttaaaaattcttaccaagcgtaacagttttaatagctgcgaagttttctataatatggcggtaacacactttatgtaaccaacgtaccaattgttgggcatttaagatttttcgcttttttattcctattatagataacaccgtgaataatgttcttatatgcgtcattgtctatatatataattatctgcaggatttttttccagaagggtttgaaaggtacgatcatttttaagccttctgaaaacgcactgccaagttactttctagggcagccagctgcatatctgttatgggcatgcacctatcgtggagataaggcaccatcagctccggccctggcaggtgttgatggcacctgcttgggcctctccctcctgaccaagtgaagctccttgctctgtcactcatgggcctttttcctatagtgaaacttgccaccattttccttcccaaataaacaaatgaacaatctcaaggacctctggagagtcttcagcctacccctccgtggcttctttgctggtggaaactcattcctctcctccagggctgtttagtgaaaaaggagggttggagtaacagatataggaggagaggacaagccttgcagttaagagagccctttcccctgggacccctgaagcctctctgaggcactaggtggagggagggcacttaccttgagtcgcaatgtagtgccgaggtcgatggtatccctggataacaggagaaaagcactgtgaagagtctgttgtcaaagcttgcaaacagcacaatattaataaacatcctctccaagtcttgattttctcatgggcaaaatgagaacagcatcagttattcccagagaagtggcaaaggttaaatgagatattgcacataaagtgtgtagtaagtcactaaatgctagctatttttatagttacttgtgaggtgcctacataggcttgccttggagccagtggcactgggagcaaagattggatgggcattgcttatccttatgcacccaaaaacaggtagagaaggagtttccaggtttatggggagcatcaaccaccaaaaagtctttcttgagccatgattatatgaagaacactgtacaagaccctatgggacacccagagaagaaaaaggaagaaaacaattcaattgttgacttcttccattagtaacaattagaaaaagaaaattgagaagcatcccacattgcttctctatgccaacattcctgggcttggaattgaagtcccaggtacggagaagaccttatggaaggctgacctgggagacccataaagatacctgcaaatacaaagaccagtttctaatttctctgtacatttcagagcactacagtaggccctgctgtactctggttggggagtaccctgctgccccataaccttcatcattggacaagaggttgaaggtgacccctcttttgcctggacatggcatacatggagtgtcctctttccagttacagtcatattgagtagaagtttaagttttggagacagacctgcatttagtgcagaacactgaatgcaattagtatttgttaaataaatacatgagtgaataaatgaatagatgaataaaatttttaaagaacacagatgccaattttagagcctatcaattgggagattgttgacagtcctgaaatccacttagcttttatggttaaccatgtccagagaaaataagtcctaaagtttgatgaacatctgtctttgtcttagatgttgctgaccagtctttttgccctgttgaggtagatgaactgcctcgaggccactttcttcaggaaatagaactgccatctgtatggtttatggtgccacagatgtggcatctctaaagttctagacccactttctgatacaaagacaagtttctgcgtcccttgtacatttctccacctttgtgtttcacttgctcgataatgattttgcaggcaccttccaattgctgggcctgctctagagttggaggttggcaccaatccaggggcaatgtcatgaccagaactgttggattaaccgcagagcaatcaacagccctactaaaactctgtgcttgaggactcctatgtacttagtgaggttgtcagtttcttaaggacaaacactccctactaagcttaaaattttttttgtcacagagctcagcacaatgtgagactcagagcaaatacccaataaacaagctgttgacaaaccaactaggcaggcaacacagcatggtggttatgcgtaccatggactccggaactcagctgcctgggtttgaacgctggctctgtcccttctagggtgtgtggtctagggcaagctacttagtctcattgtgcctcagttttaaaattcacaataacaaagatatgaaatcaacctatgtgtccatctcaatggatgactgaataaagaaattttttatatatatatatatatatagtattccatatatatatggatatatatgaagagatatatatatatagatgtagtattccatggtgtgtgtatatacatatatatgtgtaccatggaatactactaagccataaaaaataatgaaatcatgacttttgcagcaacatggatacatggatgggcctggaggccattatcttaagcaaaaaactcccagaaacagaaagtcaaataccgcatgttttcacttacagtgggagctaaataatgtgtacatatggatgtaaagtgtggaatcgtagacattggtgactcagaaggttggcagggtaggagggtggtgagagggatgagaaataatttaataggtgcaatgtatactattcaggtgatggttacactaaaagcctatacttcaccactgtgcaatacatacagtaacaaaactgcacttgtgctctctaaatctataaaattaaaaaattaatggggataatggtatttacctcatagtgttgttgaccagattaaatgagttgatatataacagttactatgtgccaggcactattctaagatttaacatatatgtctttgctattgttattttattgtttatttggcaaatatttatttactgagtgcctatcaagactaaaagtgtatgcaggcctctcaggggacactgggatgatgagaccttctttgtgttaatgtaataactgagcccttccctgtgacacaaggggtaggaagacctatcccttcctccaagtcaagtggacagggctgctcaggctaaaagaaagaattaaacccaagggttgtcttgagtagctttgggaatagaaaatagtcccctagatcctggaaagatgcagtttctcaagtctgccctcttctgccattcccatcactcattcccacagccctcatcctccctggctgaggccacagcaccaaccactagctggcttccctgcctgcagtttcactctgtagccttgctgcttcctaaccccatgagcttcctcttgcacactgagtgtgttatttccctgcttataagcctgcagtagctccctattgtctgcatggtaatgccaaatgccttaccttcggactagtcatctgtctccattttcatctccagcctcacctccagttgtccctctttgtccactcctacaaccccatgcaccctgtgcttcagcctcaccaagctgctcttgaaatatgctctcctctgggatacagagctgactcattcctcctgagtggcccagtagggctttgtatatgctcagtgaatgcaattccatgtgctgcagtaaatttttttgtacctttctcctcctgggacatgggacatgccacccagagctgggtgcagttttcagcagtctggttggtgaaatacatgtatgaatgtttttgagctgaagttggagcatcctcttaatgctcaggctggaagaaaaagagaccctggaggaagctgtgatttggaagattctaatgtgcttgaaattcagtgagataacattttgagcaagagattcacattttagttgtggagttagatggcttggattctctattttgtgaattcatttgtttgcacagttattcactgtcaatcaacaggtattaagcacctactactatgtacaaggcactggaaatacaaaagtggacccgatgaatgtggactttgcttttgagcaacttatagacatcaacagactggggtaaaggctactaatgggaagatgtggggactctgtggagtacccatgggaattgaacagccaaggagggtcccctcagaggaggtggtggttgattggctccttaaacctagtttgggcatcttgacacctcttgtcatttctatttcatcctttcagtgatgttcccagtttctctgccattctttcatcatccactggctcttgctcttcttcagagatagggatcacatgtccatccagaggccttagcactggccattccccgtgcctgctatgtctgcccccaggtacctgagtggcttgctctctcgctccatccaagcttctgctcagttgtcaatcacgtctgtggagagttcatctctgaccaccccatcagcttctttccactttctctggcttacttttcgttagataacctatcaccaaatagcacactattctttcttcatttacatgctcccccagttgaatgggagctccatgaagccagggctggcttgctcatggccatgtccccagcacctacaagtcagcctgggccattggccttgaaaaattcatattgactgaatgtacgcatgctgtgtgcctgttcccacgctgcatctgagtaaagagaccctccttggcttccaaaaacccacgcagtccccaaagagaaaacattctaaccacgagactcctcagcaaaggagataaaaggaaacgtactgctcaattggggctcctctggggattcgccaagagcgagtacagaaaacttcctaaccttaaaagaactttgagttcatttaagtcccacctacacagcacgcagattgactgcaaaccagcactgggcctgcctccatctgtctgtgagcaatgggaaagaggtttgcatccaaaacgcatttatctcactctgcactcatgcatctgttacttactggggacccagatacgatatttatttccaggctggtaattcataacagatttaagtggccaatacattttcgggtgtgcaaacaaacctgccagcgggatggttcagacagtaacagaccacggcctccggaggcagagacagggctggccccattcagctcattgtcccaatggagttattttaatgaatcgtcaagatccaattgtagagaaatgattctagcatgggcagttagctctttagagagccaggaaggattgtggctgcgttggagaccagggtgatggagtgaggacctagttagctgtctggagtactgttttgccaggaatccctatagagaccccaggaattttatctttgctggagtatgtagttggttcacaattaatggagttcctctactcttcaccctatagtggtaactgtgcaaggagttgcttgtggttggctttcttccctttgtccctccatttcccctttttccttccatggtctgctctgtatggatcgcgccatgggctcctattctttctgcttcaaattgggtttagtcaatggggaacaaaagcaggaactcagaggccaggaggaggttggggcatatgttcttctaggttcctccctgccaggtctccatgccttgcttgaccttgtcactcaatcaagggcttcagttcttgaagggcagccctctctcatagctactctcttcccttatctgggtctagggctggtaaggactccctactattgttagcctagtgatactgcaccctaccctactggtttctcttaatcctgttcacatccttattaaactttccctgggtacccactttggggaagcctatgtttccttttgggatcatgacagatactttacatcagtaattgcacacttgtggggtggcatcattatctcattttatagatatcagaatgattaagtaatttacccaagatcataaagctagtaatcaaaaaggcctggattcaacacaggtcttcaacacagaccagattcatgactttattggccctggattctaaccactgagattgagcctggagttcaatatcccataataagacagcatgaacagaggccatttgccctgtctgcctaacctattacagacagaagaagaaggtcgtggtgtgtcctaagtgggcagagaactgaagttcagttgtgtgaccttggacagtgctcttaacctacagctctggtttcctgtctttaaaggcttgaaacatgccttgcaatgataaaacaggaaatgaatcagaggcataattagcagttgtagagattaacttgcatttaaagcaatttcgtttgttgcctataaaataccaaagtgtatcttggccctgactgtagtcagatgctcattcaactttggagtgagtgcctatctaggaaaatgacttttgttgggggattctagtcaaatgatgaatgccagatacagaaactcaggcatgccagaccctgtgtggcctgtggtccttagggtcatatccatgcagccatagacaaggtcgaggagaaatggaaggaatcaattcaacctgcatcaatatatgctgactcggtccttgctgtgtgttggctacaaggcggtgtctgggagtggggggggggaggggaaggagaaagagtgctaaactgggagccattcaggtctggttcccatcctggttctgccactgaccagctgcatggcctgagacgtatttgtgatttctctaaaccttagccctccccatctggagaatgggaatgagaacacctaccttgaagggttgttaagaagttttgataagctgacttacttgagccacccatcataggaccccaagagtgactcattaagagccagttggtgttgtcattgctcactgtgattattaaagacagcagggtatggtgggagaggtactcttgactcaaatttctgctccctcctcccctacctcctagcagtataatcctggacaagttatataatcttaagagactcacttactcatctggaaatgggtagtagtggtacttaccttgtgaagttgtgatactagttaaggtgatgttggtacatgaaaggtgatcagtaattcttaggttactataaacccttcttgcctggctggctctaagtcatctttcaaggcagaactgagacatcacctcctccagggagccttcactggctacttccctttcccaccaacttgaagctttgattttcctttatggtcccacagcccctgctctgtgaaggtctattttcttatctgactccctcaccagatttgagtcccttttaggtcagagacctggtcttaaaagtcagtatttcccatacacagtggagggtctgctctgtgtttgtgaactgaatactggatgtatgaaggaaaggctgctggcatgatggatgtatgctcagagtgccttgctctgggctggagaaaagctattcagaactggctgtctcctgtgaacttttctggaagggctatggtggcagagacggtgttcatcttcaactccactgaagttgcagcctcagttcttggccatgtagtaggccctttgttaattagggtgtagttagggaaacagaaaccagtctatgtgtttcagacgaggcaattcagtatggggagttggttacacaagtgatggaggagccaagatgccaaacagagaatagtggggcaacccagagatcagggacaggactaggctgcaaccaacccttagaactagtgggagaacaggagagggagaaataactagagtccagagtccagaaataaccagagccccagtgggctgactggcaggagactggactatggcaggcctgcttgaggaaagatggagccacagacagggtacagccactgctggagttgctgcccaaggaagggagtgagatggagaatacactgcccttccatcatcctccagtgtctgtctgtctgtctgtctgtctctctctctttctctctctctctcacacacacacacaccctgcaatgcaaggcagaacagggaaggacacaaaatagatctgagggcaagcagtcagatgatcaatacaaggctcaataagtatttgttgagttaataactcacctggcttagtctagattaagggggaattcacaaactgcaccaccacactttatagcctatctataaatacatttgagagtctaggggaccagtatgaatctctgtgccattcttcaagacccatggactgtgagctgaggtcctgagatgcatggcttgaatcagtcacattgggttgtccttctgacctcagcagtcatgctcttgcttagcaaattctctcacttccatgcatacccttcttggctcctgtttgagtttagtcccttcctcagtcgtctctggaatattgaagcagcctctttccttattggttgtagttgtcttaattccagaatttcttccctcggatctgtcttatctttggtagcagataaatcatgccaaagctcagttctaagctggtcacctccttgataaaaaatttttaatagcttcctcttgtctatgggataaagtcccacttcctaagtctgagcatttaatcttcactgatgtagtcccaacaatattttccattattcctgttacatattctctgctcccctcaaatggagctgctatgtatctcctggccagttgctccatcttggcttgtgctattctctctaactagaggcccctctcccctctctttgattttaaatcatatctgtgcttgaagctttggttcacatcatattttgcattcctgatgggagaagtgatatttttccctacttctgaatctctgcagcatgttatctgtacttttgacacttaacaatttctactttgccctggaattattgatgtgcacattatctccctgctaaggttttaaagggtagagaccatggtattattagcattatggttcccatagcatctagtatacattttacagtaggcactttaaaatttttgtggcataaatggccatgcgtttatgtgaatgaatgaatggatcaacagacatatacacaaatgaataaatggggtgaatgagtaagactaacagttgtcctgaggccccatagagcaggctactacagctagcctgaaagtggatgcagtggtagatggacagtcaacttgggttacactagttccacatatcaaggaggatccagactgctctggaagggccaccttctggaggagagtttggggtaaaccacagatcttgagcctgcaaaagccagccccagcccccagccccattaagacactcacgtcaatgtagttggcattgatgtagtcagagtgcgggtctccatccagcaccagcagcctcacccgggaatggtcgtctgcagagagagcagaaatcaaggggatggttgataagaggccttacgcagctaatgtcctcctttagaactactgtttattaatgactgcatatcaggcattgtgctactctcatttaactctcaacaccaccctcagttactgctcccatttatagatgaggaagtggaggctcagggaggtaagcacttctcatttttctaccttcccttctgatttcgtcattacctaactggattagtcacctgtttctttaagtcttagtgacttaatcattaaaatggggatggaaatacttgcttcataggacaatgtgagagagaccatataaaaatgcttaggacaggagagtgttgcatctggattaatatactccattttcatgttgtttaaaaacagcaagtttacctatcttccacacatgcacaaattgcttttcatttgccccttggagtattgttagagatagattgtcagccatatattgttatcaatactatcattaaagtgaggctgactaaatcattataaaagaggtcatcaataactaaaaattgtgttatagaggatgccttttcaaacactatctagacataaacaagatttgcaggctttatttggtagcatgcttacttcaactaacaccaaataaaaaccattaaaagaaaaccagtacagcagaagaatcaggataatcctttacagttaattaagtgagctctgacacgctaatagacacacacaagtggaacattggttcggtctggttgggaggagggaccttggtttgctatccaggtcactgtgcacgtatcattgtgcagtcactgcatcctagttcaccttcctctagggcaggaatgggtccctaagatgtgggctggagagctctggacatccccaagggttttctgggagtcacggaggtcagatcagcttatcttcttagaattatacagcattctgcagtttacaaggcacatttattgcaattaaccaaaacccccttgagaactgggacattatgccttattccctgttccatcccctgcacctttaaaaggtcctgacatacagcaggtactcagtagtacatggaaaaggtataattggatgccctcattgggttctcacagtgaccctgtggaagagaagtaggatgggttcttttagcccttgttacaaatgaggaaactgaggctccagaaagcctgactggccacatggccagtgaatggtagagcacagaggagtgaagttctcttaactctgagttcggtcgctcctgtttccaaagggggtgtaagcacaatgttagaaaccacttcagatatacccagcagagggaattaactactgagaagtggttgcctgggttacaaagagttgagcagccagatagaagaaagtggagaaactcagagataagcagcaacaaggagacactgcctgcccttgggctgaagggatggagggaggtggtggagttggcagtgctcaggagctggggccacctgctggaacctgaagccacagtgggattctagtaggagctggaggcaaggaggtgcttcccttgctgctaaggaaggcaattgtagttgtaataccctggcttctccctttctccttctctccaatctcccagtgcatgtcattggctaaacctaaatagctgacaggagagcctgaaaaacacaacctgcaggggtaagttacctgcaatgcacactagagtgggagaaggtaaggaatgggtcctattatggacaaacaggcctagggctggtataagatacaccccatatctatccattcatttaagaatcattcactgagtatctgccatgtggcaggcaggcactgtgctagacagcaagttatactaaatgcgacttttcttactcatcagggggaagtttcagcagaagcaactagagggagcaggtgggtggtctaagcaatccctttgggtgagtgggagagtggaatgtgacatgggggaggagtttgaagttaacctttattggattcatggtaggtaagagaaactttacatgcattatctccttcaaccatttatgcctcaaaatagccatataggttattataaggataccagaatgatatggtattatgagtcttcccattttacagatgaagacactgaggctcagaaagattaagcaagcttccgaagttacgcatcatgtgtgtggcagagataggacttctcggttaggtttatctgaccctgaaaccctactctgcccacataacttgctgtcccagagtctcaggcatctcacaggcactacagctggagtgtgtgcaaacagctcttccccagttcctgcaggattctagccccagagaggacttcctgggggacagcccatccagcaggctggaattcagacaaagcctggcacctgactctcagcccagggcatcaagcctctgttaccagcagttccagaagctgtaggcctcaaaaaagtgaaaatgcacattgtgttttcactcagtggtctcattatgacttactgattcagaaatctcctttatttgttgagttatgcctgcccctggggcccatagcactggaaacagagattgtggtttaaaatgttgaaagggaatttttaaaatataaaatgaagttgaaaaaccggaaagcaaaaatgattaaaaacaaaacaaaaagaaacgaacttatttattctagttaagtgtacttatggatgaaagtgatctctagccaccagatgatggtgtttgacaacgtctctccttcatttattaagaatgtgtttactgcacacctactatgtgccaggctagttgaagggattaagaaagtgctatcaaatgtgatactcatgtttaaggagtttgtcaatttagtggagacagactgtatgcagaagcaaaacttccaaatctagaagatggggaatagagggctttgtgtagtgacatgtgaatgaggaattaaaaatgagtaaggtttggccagtgcacaatgaggaagtctttccatcagagggaatggctagagtgaaggcagatatcctgaaaaaagcaagcaccgtgggggagctgcaagggtctcctgtcctgggaaaacagagtgtgaggggaacagcgatgggaggggagacagaggaggcagcagcgggggtttcatttcagaaggctctccatgccctgtgaagccatgaagactcaaggaatcatgctgggctctgcagggcagcctaatacagtgtttcttttctgggacagtggaaaggtgctttattatgatgtaaccaaaattcatgcctacacagctaacttatgtcaagtgagataaacttttaatataagacgtgagatatggagctgtgatcagatttggcttcaaatcttagctccatcacctagcaagtcaattgatctctcttagctttggtttccttagcaaaatggagccaatactatatggcatgagaggattaaatgagaaaacataggtgtgaaaagtgctaggacattaagaaatgagaggataagccacagactgggaggaaatatttgccaaacacgtatctcagaaaggacttgtatcaaaaatacacaacaaactcttaaaactcagtaagaaagcaaatgacctgattaaaaaatgggagaaagatctgaacagacacctaatcaaggaagatatacagatggcaaataagcacatgaaaagatgtttaacatcatgtgttattaagaaattgcaaattaaaacaagataccactacatacatattaggatggccaaaatccaaaacactgacaccaccacaggctggggaggatgtggcacagcaagacctgtcattcattgctggtgggaatgcaaaatggtacagccactttggaagacagtttgacagtttcttacaagactaaacatacacttaccatactatatctagcaattgtacttcttggtatttacccaaatgaggtgaaaacttatgtccataggaaaacctgcacatggatgtttatagcagctttacttaaaactgcaaaaacttggaggcaaccaatatgtccttcaataggtgaatggataaacaaattgtggtgcagacggtccctcacttgggatgattagacttaggtttttttgactttatgatagttccaaagcaacatgcattcagtagaaaccttaatttgagtacacatataaacgttctgtttttaatttttggtacagtgttcaatcaattccctgacatattctacactttattataaaatgtactttgtattagatgattttgcccaactaatcatctaatataagtgttctgagcatgtttaacgtaggctaggctaagctatgatgtttgtcaggttaggtatattaaatgcatttttgacttatgatattttaaacttatgggtttatggggatataacctcactgtaagtgaaggagcattcattcgatatccatacaatggcctatggttcagtgagaagcagaaatgagttatcaagctgcaacagacatggaggaaacttaaatgcatatttctaagtgaaagaagccaatctgaaaaggctacatactgtacaattctgactatatgacattctggaaaaagataaaactctagacacaggagaaagatcagtagtttccaggggcttgggaggagggaaggatgaataggtgaagcatagaggatgtttaaggccgtgaaactattctatacaatagtgcaatagtagatatatgtcattgtacatttgtcaaatcctatagaactgtacaacataaaaagcaaacctgaataaactatggactttagctaataataataaatcaatattagctaattgtaatgaatgtaccacactaatgcaagatgttaataataggggaaacagtatgtgggtgggagggagtacatgggaatgaggtactttctgctcaacttttctgtaaacctaaaactgctctaaagaaaaatgctaggacaatgcctggtacacagcaggtgcttaataaatgatggttttggggctgaatgtgaggcaggcagtgagctaatagcagagatacttagaaacttggtgctctccacttgacctctgtaccaaatacagatccatctatctgcagaggcaaagaactattgtgtgtgttcactaaagggtggaattcagctgtaggtccaccacaaaggcactgcaaggagtggcagtgtcctcatggtttatttattccttttgggagatgctaatattattctgtgtccccttcttcttctaactttatataattagaaggataaaaaattgtgtttacccacatgcacatggagaaagatggggcggcaggcgatgtgaaggcgtttatacgaggtaatttacaagcagcctagaatgttcattatgctctatctacattttgcaagcttgaaaaacagctaatttggtactccttgtttgatattcaagacaaggagaggagttaagaagagtcatgtggaggagaagcaaactcctcaatgaggcgaggggaaggtgcagcctggctcccccggctctcagttgaggtgagagatgggcaagagctggctgtggcgaggagggaactggtggcagaaggtagaagggagacatggtaccaagacacataaattcaaagagctccctttaacacaagtctaggggaacatcatcactcagtttgcaatcaatctgctgttccttgcttgaggtcaaagaccactagtatgctggtaaatgtttaacatacagctccctgtgggaaaaaaggccctgatcagtaatgtctgctgatttctgtggtgtaaatactcccaccatgaccgatttcaagctaccaacatagcatcaaccacctcacaaaattcctgaaaatttaacaatctgcttttgcaagctggtatgagtcagctacagaacaccactgacagaggacaaagcctagcacaccctgcaatgtcttgcatgatctgatggtttgggacctacttctctctccagcttcacatactgctctgataactgtggtcttctttcagttgctcaaatgcactgtgttcactctgaccacagggcctttgcatgttcaaagaacacctccatccaagctggcagttgcgcctggatcctgggctccaattcttcctctcctcatagctgacccctcaccacacctgtagacccagcctatcccttccaaagactggcagccaattcttgcctttagcagaagggaggttatggattgggtggagtctgaaggcagacctgaggcttgtcacaccctaaccatatcacctggggtaggttaccacctcccctgagcctctgtttacccagctataacatccaaatcatatatagctgtgcagacttgctgcaaggattaaaagatgtaaaatatgaacccacctggtatgttgtaagaaattaacacaactatataaattcagttttgtttttattctagacctgggccaatggcatcagcagcacctgggaacttgtttgaaatggaaattcttgggccccagcccagactcactgaatcagaaactgtggggtggggcccatcaatatgcatttcaatatgccctccaggtgattctgatacacgttcaggtttgagtatacagaccaatgtttagtgacttagtgcagaggtgctctggttattcacttcaatctgtcttgggaaagaccagaagatcttactggaaatgggccataagactagagactcaccttgtgccaggtggtgggatacggaaatttagctgtgtgaaaagtgtaagatgttccaggcacttatcaaatgccatggggatgccatgccatttgattctcacagtaaccctgtgaggtctataccatcatcccatttcatgaatgagaaattcaaggctccaaaaagtttaataactcaggagaaggtatagggatgagggcttctttatagagttgtagggtcctcactcctcctggaacgctgagatccatgacctccatacccttctatgccacacttctccagcttccactttcctctaagttctcagtctccaacattggtcctcatcccactaaggtctcatggccacccgagagagagggttcactttcctctttcatacagttctaactctcagaacaaaccacaactccttctccctccctccatcaccaaagatagcccagtaaacctgtcatctcaacccacatccacttaaagagagaatcacttcaaagaggtggggctggggagagaatattatttggatacttgatattctttcttcctgtcttctgggcactacagagggtaaagaacagtgctttttttttttttttttttttttttcagagaaaagagatttgactcattacaatgaattgtggagctgaaaaaccatttcctacaagtattggaaatgttaatgccatcatcttgcaaaagtggataaggaggaggcaggtaattctgctgagactgcctgggtacctcactgaagctaaaggtctgcacattcaatcttgattgaattaccattatcaagagaggctggcttgggcatgatgcagagacagcccgacattctgtgtacctccttgtcctgccagatccatgctggctgaaattggaaaacgcccctttgtggggtcctgggaggagctgctccagtagatgcaacctttgaggggactgaaggggactggagttgagaggggcaagcaccaagagaggaccacctgtgtcctaaggatgccatccaggcactgccccactgaggggcctttctgaaggaagggagggaggtttcttatttggatttcttcaaaagaagaacatgagatatgtatttggatgcaagtagttgttgtcggggggtgatcccaggaaacaccagcaggggagtgggaagtgagacagagaaagaagaaatctaataggggtgtgtcattcagcaagttgccattgtagcaagttgaggcttaattcggctgaggagctctgggagtcattctacctaagcagagagggagctggggtatgtatatacccacttccatcagtcattaattgagggcaggttctggggacatttaatattctggctctttgggcctgccctgcaagaaggcagagaaggctctagtggccagaaaaagtccttaggaaaagaagcaaaggtgctggcaatttgaattagcactagcacacatgcaagtagtgagtgtttggggatatggcagggtaccaatggtttctgcaccacaaggcatctgtaggacccaggcaatggccaccctcagagacagtgaagaagaatggaggctgagagtcaggagcattgaataaggcacccactctgtcacccccagctctgtctccccaggaatcagcagagaaacctgctgtgaaaaaagtcctctgggttttgttttgaacctgagttcctcactaggagtgagggtcctctctgcactccatagccccacctccttctggaaaagatgggcctctctgaagagctcatctgctctgaggttgggccttagcaacacattctcccccaggaacatggatgtgacttgatgcagagaggactctttggtaaggaatatgtgccaccctaccctggcaggcaagagaccacagctctggtcatggctgttctacagacttgctgtgtgctctcgggcagggcacagtccatctctgggctctctcttcttgcctgtgaactcaaaaaggctacactaactcatctagacttaaaagtctgtgacttaaggggccacacaagattcagatttaataatcattcagcttaatttggcctctccatcctgagagctgccctagagccatctgatgggtgagaacctgaaggtgggtgaggtgaagtgattgtgctgaaggtaaacaacagaactgggatgaaaacctgggactgcctgacctcatgtctaagaccccaatacacctgagcccagtggcttttcctagattgggagaagataagtctcagaaaatgtgctgatatcctgtgtgcccgcagaccccctctccacttcatctggccctctaatccaggaggctgattgctatggccaagattggacattctcaaagttgcacatgcgtcaccatcacctagagggcttctagaaatacagattgctagactctgtcctcagaatttctgattcagtaagtctggggtggagcccaagaattagcacctctaatgagttcccaggtaacactaatgccactgctgtaggcattatactttgagaaccactggattaggtcaacagatctcctgttctctggattctggttggccccagccaatggaaagcacaggcagaagattgggtggagggaggagagtgtgatggaggtacttactcctccagcaccccttggtggggtcaccatgggtggctgccttgccaccaaaggtcgcacccacctctggtcaggtcatctctctttgggtcctggtaacccctcctacggaatccttcctggtctgaggatggaattttggtactgcactatcccttgtagtctttctacatctagattacacctttataaagaactgatcccagaagggggcctcattttgtaacatttgcaacccctgtgatcacttcagcttctcagtgtcagcaccttcctgccagtctaggaagcacctctaaaactttacatggagaatgctttgggattcttgaatttccccttgccaacagtcgctgccctagagttacttggaagcaaaggtctctttgttcttattttacccattcatttccttccctttcacttcctttccatttacactccctagaaaccccactgtctctattactaaattctaaatagaatcacttggaagaaaggagatatttcgccaaggtctcttgttgtttcttttgtaggcagtgccctccctcctacttgtcccctttaatcttttctgttctccctggcctgggcctttgtcctccactccagcctcacagtgctctgggttccttaagatgctaatcacagccagttttcttcttgcgccaagaatatttctatttatcaagcctcggcaggctttgcctttgggagggacgcatacaagggcaggaacactttccattccttggggctgtttcttttttacatatcccatttcaattccaggttgttttttttccatttccctttttttcttgattctcctttatgtcttgcgctgctttctgaattcactggttacctcggcactgtcttctttcagcactgaatgcagacctgctcttgccctgatctcttgcagaatgattgactcttaaattagaaaggagattctggtttatttaaacccatcaaggtggtatcgtcaaggtgcttcagttctctctgtctccatttgggttcctcagaagtagatctaagacagagattttagtccaagcagtttatgtaggaggagacaggaataccagtaggaaaggggtgatgtacgacagggaagagaaggcagcttattaagggtgagttttcaagcccattaggactgcaggtagctgtattctcatccctgtgggaactccagaaggaacttcaggagaacggtgaagaagctggggtatttcatggtggagggcttctcctgggggtattaacccttcaggatttgcaggctgcctgtgcctgggcaggggatcctttcccagctttggagaaagtcctcagtctaagagatgcaggcagggcagggctagggtgaagcaagctcagagtctcaggcataggctttatcagataagtgactatatattttagggtacagtgtccacagtgcaggagcagagaatgctggggaccagacagggcaagcagctccctgtggcagagtgggggctccccaggagcaggagctccacctcccagtgcccatcacagggcctgctttgaggaggcccacatgtcataagtcttaatacatgtttgctgactgtttgaatatcacttctcaacacttcacttgcaagaaatcttgctgtctgaattaccatcttccaagagagaaattataaatgttttctgattagttctaccattcatagcccattcctaaatcagcacaggaaacagctaagctaaaacttctgcctttttcttcctttacaatctgcctgtatcttactctttcttcctccaagttttttcttaggcaatgtctagacagttaaaacaaaacaaaacaaaacaaaactctgaattgtgctagaaataatttgtcattcaggatcctttttttttttcttttggatgaactgggttactctgtgagctgagacccagggatgttccccacaccattggtgagatgtcaaaaggtccaggttggttacactgagtcagacaaaggctgttgtagactcctgttctaattagaatacatgcttagcattttgcacgagataactttgtcttctctgtatttattttactttgaaggctgtacctacgaatatttggcagtgacaatacttgtgtgttacctatgcatgacattcagttctgtggcagtctctctcttcctcaccccccagaactgaataccatgcacctgtcacacacaagttattgtcactgtttgttcaggccccatcatcccttggtgagactactgcagtagtctgctgactgatccctctgctaccagcccttcccaatcaagtataccttccatatctgctgccctagtgatctttccaaaatggacatctgatcatgcccacctctccccaaccaacctgccttattctatgtccccacaggacatgtcctgagtacccagtgaatcctggttaataaaataaggtggaatgatagatccatgctgctcaccagtgacctcaagcaagtacccctgtggctaagagtaatggtgccaggcactgtagcaagagttttatgtacctttaaatgctcctcctattatcctcatcattgtaaaggggaggaatcaaaagtttacagaggtcaagtaactttcccagggccctacagttgggatagaaacctgggcagtttgactcccgagggcgctaactactctgcaccgctgacttcatcaatgagtcattcactgggggtgcctacaggaaaggtaaagctcattgttgagcaaaggcaatgtccttccttagctctgcgtaacatgccttcccctgcaggctcagtacctcccgaggtgcactgatgcagacctgagggcaggccctcacctcagagcccctgccctactatagtggggacaggtagaatctgtgttgccctaaactctgtctctcatactataggagtagccccgggctcctgtgaggcctgagctgggcataccccaagccccaggtgtatgccagagttactggcttcttctgagcatcagcctttacttccaagcatcagccagtgtgactccaccttcttggaggagcatcattctcttgcccgggttctcctagcccctccctcacaggctggggcccatgctcctcaccccaggttgctgccaaagtcctcctttgaattagaggagcttctgggaacacagagctcatctctttatccagctgtggggtcttccgcatgtcagcccttttggctgggcttcttccccgacctgaggaattgagcaggcaatgctcggtgagacccagccttcagaggttcttccccaagaggcttcatggttctgctctgccctgacccatctccctgcctgctccctctggctgagatcagccatgctctgtcatccagtctagggatggcagtaaggctgatataaagcttccatcttggcatgtagatacaaagctagagacagcaaagattatttgataacaaattccaggtaaataatagtaatagcctcttttcccctgcatcctcaacacctgaagcttaggagctcccagaagggcacctacaggatatgatgttcccatatcgattcttattgcggttttcatcctccttggctgtgtcccacgaagctgtctgcccctctggtaaggcctaaaaagcaaggacagagtggttagagtggcctgagataggagctttatggaagtggagatgaaccaacagggcaaagtaagacccactgcgatgggactcctagtggaaagggatagatgtccttggatggggcctggggaggacatagattttgtctgtccctggacctattctcttgttcattgtttcaaatgttattgatgtcttctgtgtcatgagttcacaatctagcccagtgggggaatcgcttgtccattcattgaattattcattcatacactcaacagatacttactgagcccctaacatgggctgggcactgttttaggtactagggatatagagaaacagacaagttccccttgagcttccagtcaactaggaaatatagtaaatgtgtaataaaagagtaaatgtgtaattttagatatgaaaaatgctatgatgaaaataaagcagaataaagggatagtgatgaggaatgagaattatttcagattatacactctgggagggcttctccaagaaggtaacattttagttacagtagtcctcccttatccttggaggatttgttcaaagaccccccagtgggggggctcctgaaaccatggatattaccgaaccctatacatactatgttttttcttatacatacatacctatgataaagttcaatttataaattaggcatagcaagagattaagaacaataataaaatagtatgacaacaatatactacaagttatataaatgcagtctttctctctctctctaaatatcttaatattttttgactgagattgaccttgggtaactgaaaccatgaaaaacaaaactgcagataagggggacttcattaatgatagatactataattccttcatgatactgtaattccttaatatgaaacagccagtcacaccaagaaaagtagaaagtgcttttcaggcagagggaacagcagatgcaaagatggtcaggcagcaaccaaatgaccatattcaaggactggagtgttgtgaagagggaagtagtgatggaagtatctagagcggatgggggagtccagattatataagacattgctattactggttaatgaactgggcattattctaagtgtgatgaaaaaccatcagagggttttgggcaggggaatcatctgattcatgtattacaaagtacaatctggctcatgtatggaacacaggctctgggaggggcatggaggaagcagggagatctgctagaaagttgtggcagtggccaggcgcgatggctcaagcctgtaatcccagcactttgggaggcctaggtgagtggatcacgaggtcaggagatcaagaccatcctggcttaacacggtgaaacccagcctctactaaaagtacagaaaaattagccgggcatggtggcaggtgcctgtagtcctagctacttgggaggctgaggcaggagaatggcgtgaacccgggaagcggagctggcaatgagctgagagcacgctactgcactccagcctgggcgacagagcgagactctgtttcaaaaaaaaaaaaaaaaaagttgtggcagtactccaggcaacacatgatggtaccttggactcttagaccgtggtggtggacatatgagaagtgattatttgcaggatgttcagttgaatgttgttgacttgggttgcctcggaagcagactcagagataacaagtcaggcacaagtagtttgtttgggaggcactcccagggagtttgggtgggagaatgtggaagtggcacaatcaagggaatgaagtcaatatagagcacatcaatgagcaggttaccactgtgggcaactggggcctaatccaatgggcacatctcatgccttagagttatcccaccatggggttggcacaaagttggggtagttactgatcaattcgcatccagtattggttgaggacaactcttggaaactccccagcatttcttccatgctctgtgggcagagtgtgcatattcttctgtcttgaagaagccctcaggcaaaaagtcacaggtgcttacaggaggaagccataaggtgggcatgcgtgggaacagtgagtgtagagtggatgtgtgcagggcaccatctgccatagatcctgactgtgaaggaaggagaggaaagaaggctgacccttagatcattagtttgaagaactgaggggggagagatgtgatttattgagatggagaagcctgggttagaaacaggattggggaggtaagaattaagtgttgtgttttgggtacataaagtgcttagtagagtgcctagcattgaatactgcacacttttttaaaaacatgttcaaaataacaaaaatggcagccacgttggagatgtccattagacatccaagctgatgttgaataggaagttggacatggacacccagagcttagggatagggaagagatagaagtcatcaatcagtttaagaggatggcaaccaccgataagacagacaagtcaacaaacatgagacaatttacaagagttatgagtcaagtggtatggaaacacagggaagggtgcagtcagttatttcacagacagggaggacgggcagttaagggagtgggaacagctatagaaaagctgcagaagcatgattatcagaccatgttttgattactctctctaccctaaatttagtagaataggctgaacatcctgctcatgccctttcattgcttctgagactgaatttgtaacaccttcagtctacacagctctctgtcagcagtgcaggaggagaacccaccattcattttaatacaccagccttgcctttgcccatctattccttactaggtctatcctaagcaaggaggaacctgaaccaggttgatcagaaattcagcccctcaataagccctgttttattggcaggttcttaacaggccagtgctcatgcatggttctacctttcttgcatctggtctctcaagtgttaagtcaacctgggtgagtcttttcctagagttggagttggaatgctttttctgtaatgggcaaactagaaagaagtttgggctttgttagttgtgtagtctctgttgcaacaactcatactcaactctactgttgtagagtggaaacagtcacatataaaaatcaaacaaatggtcatggctatgttcaaatacatctctatttacaaaaataggtgttggggccagacgcagtggctcacgcctgtaatcccagcactttgggatgctgacgtgagtggatcaagaggtcaggagttcaagaccagcctggtcaatatggtgaaaccccatctgtactaaagatacaaaaattagctgggcgtggtgacacatgcctgtactctcagctactcaggaagctgaggcagaagaattgcttgaacccaggaggtggaggttgcagtgagccgagatcacgccactgcactcctgcctgggtgacagtgagactttgtctcatagatagatagatagatagatagatagatagatagatagatagatagatggatgttgggctggatttagcctatggctatagcttgctgacctttattctagaagcatgactatgatcctcatctatgcagtggctgagtaggtggaattagtgctcattctgctacctagcaactgaagattcattagagggcacaggaaggagttcctttcctgggcttctcaggctgagccatgttctacaacttagcctttcttaggttttagattcgggtaataaagtgccttcctagctattaatgggtcataattttgttctttctgtgtccaacgcccttagacaaacatcctggaagagaagcaatacaggtgctaggttttgggcaccaatctctgacctaaatctgggtatggcaaaaatgttataaggataggtaagtgctcatttcacaaatgtggggcttatctctcacttttctcctcttgttctttctccttcttctccttttcgtatttctcttcttgctcctcattctaccaaaccttgcatccatattgccaccagtttaggccatctctaggtggaagatgcttctagctactgcaggtaactcttagaactcagattccagccctagcctcctcttctatcccagccaggtaactccatctcctccaggcaacttgccaggtctgttctctgtatgtgaagggaggttgctgctctcagtggtagcactggacttctggatgtcaaagctgatctattgagggtggattttgtacctgaaaccctctgtgataaaagccaattgttcaaccaaacatgtccccctgaaagtggggtgaagccaaaagcaggatagcatgactgttttcatactaattttttgaaaaaataattgcgttgagtacttgccatgtgccagggtttgggttaccattagcttaaggtctctttatgactgcacattagaatcacctgggcaggttttacaactcccaaagccaaggtccttctcaagaccaatgaagtcagactctctggggtgggacataggcattggtagtgtttaaaactccccagctgatgctactatgcagccataatttttgcaaatagtgactttaaaatattttcccatgagtctcctcattggttccttttgttttgggtttgtcccctccaatccattctccactgtaatcagaaagatctttctaaaatgtgaataggacccagtgattcctcttgccattgccttcaggataaatttcaaactctttagtgcaacatccttaatgacttcaccccaaatgcccctgcagcatcacttcttgctcttatatctatcctaccagttataaggtgtttaaaatttataagacttttcgcatgctgttccctttacctgaaattcccttccacctgagtccgtctgacaaactcctacatgtccttcaaaactcagcgtaagcatcttctttgtggaatcttctctgttcactctccctcaccccactgcatccccaggtaaagccagttacttctattattagatagacttctttgcatctaataatttaactctatttctcaacttggtcataggcttcttcaaggaaagggtagcatctttgtcacgactgtatctccagaacccgatgctggctctatacttcagatgtgcttgaaagacctatttaggatgaatgaatgagtggaataattagtgaatgaggtggcttctgtgctttcagagggcaaatatcctgggatcttagaggtgtcagtgaccttgaaaattgcctagttgtgttcccatccacaatggccttccaagcagctgataagtggatccatagcatctatcacttggataacctccatgacagatagctcaccacttctccaacttttggcctcacttttggacagactcaccagagttttttctttactcaacctcactgcactttgcctatgccatctcatggggccccacagaataaatgtgtgccctttctctgtcctgtgacatcctgcagagatttcatgaaagtctcttgtattcactcccagaatccttgaatggcagtttggggtcctctcaccatcaacaaacaccatgccttccaggagacaccccagcatgcacctatccctcaacaatcctaaaccgaacaaaacagttgtgataagtgggtggcagttcgtgggaaaccacacaggccctgtcatggtcctgggagcctctgtctcccttagtgggggctgaaggggaccgagtaggcctgggggctgtgatgatgttgataaaagcagaggagggatgcctaatagagcctctgggagggagtggtaatgaccccgtaattggcagactttgatcacacatccatttccctttttagggagctacaatctaataagggataatctcttgaagcaaaaaaaatatgagggggaaaagtatgaaagagagactcatttccatcttcaaagtgagcaagctaagggcattatttttccattagtggctagttacagtagattgaccagggaatggtggcagtcattaggcgctaatcacattcttttgaaaccaaaattgccatctcattatattcatccattatcaatctccgctttccttttctcattctcttctcctgagagtgctgggccctatttttacattcctctctgagtgtggaaatgtttcctactcttcaacagtgttgtttttccaaggcagtcattttttttttttttttttttttagttcaaaagatgtatttggggatgtccttatccctggagagctgcgccgtggtatttatagaatcctcaaaagtcagatttggaaggatcttttgagaaaattattgactcattttatagatcagcaaagtgaggtcctgagacaggaaatgacttgcccaagaatatacattgagtctgtccccactccctccctcactcacttccttccttccccagtgaccatctggatgccaggtgctgggatagacagggacccgggcaagggactagatagggtggtgtggggagaactctgaaaaggggagatctgagagggagaaaagcagcccctgaattctgggagctgacctggcactcacaggtaggccttggtgctctcctgctgaacgtggacaattgcacggaagaccaaccacaggcaaggccgctctgaggccacgatggaacaagacaaaagcaagttgtatctggatgcagacaaagatatgaacattgtccaagccaaaaaaatgaccaaacacccccatattctggttaatatgagcggcctgattctttgccaattacagctctagcctctatctgatcttcccttcttataggtaagatgtattaagatatccaatcataccacttcccagtgtgtccaacctaaaacaaagcctcacctccttagggcctctttcaaatcagcaaacacagcccacattctgagtccttcctaacatcctcttcctgaaatgtcccacaggaatgcacacttccaggtatgcattcacttcattgcaacaagtgataaacccaacttgttcacctccaggaggtgtgtccctgctgatctctggccaatacatttcagctaaaaactaaatgataagcagatgccagctttggcgagagctggggaaggaatgttccattcagagggaacagcaagtgcggaggccctgggatggaatgagctttttgtgttctagagcctctagaaagggaggctctccagagcagagagaataagaggaggatgacaaataatgtggatttggcttggggttggggcagggtgttcaatcaaggtctcgtggaccaaggacaagaacgtgagttttattataattcaatgggaaagttttggatttttttttttttttgagatgatggaatttccctcttgttgcccaggctggagtgcaatggcatgatctcagctcaccgcaacgtctgcctcctgggttcaagtgattctcccgcctcagcctcctgagtagctgggattacagtcctgtgccaccacacccggctaatttttgtatttttaatagagacggggtttctccatgttggtcaagctggtctcgaactcctgacctcaggtaatctgcctgccttggcctcccaaagtgctgggattacaggcgtgagccaccgcgcctgacccagaaactttttaagaggggtaggctgagctagtgccagcatcatgataaatggcagacagtgcttgtcactggaaccttctttatccttgatgatatgctttatagattttagaataaaattatcatctggtacccgccccagactaactctccctgcgagtgcaacccaccctcctatccacagagctgagcccatgggaggctcagaccacatgaccacaagtcacagacttcttgtgttctgctgtgctgactcagtccataggactatgaaacctacctcaatgtcccacttagtacgttcattttctgctagaactgagaatgatcgctgatgcctgtgtggctgattttttcttctacctggttctactgagccaaaccaacagaagcttgccatccttctttagacactcttctttgcacctaagcccttctgagttatgcctaaaatagtaagatgtcaaaacacaaagcttcctagagcagctcactcccaattcaaggctgagggcgtgtcagcccatttcatttacccatttacctcctatcctcagcagattctgtcatttgcaatgccccccttcactctcctttgcttgactgtatccctggagataattggatatgttatgccctagggtgcagcaaaaccaggccagggatcgctgatgaggcagttcctggctgatgctccagggcacagctgagggcttgccgcctccatgttcagtccagcctgccaggatttctccacacccctgtccaacactgtactctcctggtgcagggaacactctggagagtcttcagcaaggaggcaccattttacctgggtctttccttcatttgtcttgtcaagaaatacacttgcacactaactgtgtatgcgagtcagggaaaaggcagagctttgcaaaaggcagacagactaaaatgtttgaatatttttactgcaaataagttcaccacttcgagtgtcaataaacgtttctgaaaagagtcagtaatacatcctgaaggttatgggtggggaaggatttaactatacagaagtaacgcaaggtaactttttggttgatgaaattctcatgtgtcctgattgtgttggtgtttaaacgactctatttattaaaactcataaaactgtacactctcccaaaactaattttatactatgtaaattttaaaaaatggaaaataacacaccccacggaattttgtgatgattagtgactacccgatacaatacccatagcacctggcacaatgcctggtacacagtaggtgcccagaatcttccatcttccatatcctctttcccagggatataatattgagcctttttggtccacttgtagaaatcattctcttgccatcttcagtcaaaaacatcaaggattttttttttttttttaattttactttaagtaagttctgggatacatgtgcagaacgtgcaggtttgttacatagctatacatgtgccatggtggtttgctgcacctatcaacctatcatctaggtttcaagccccgcatacattaggtatttgctctaatgttctccctccctttgtccccacccccaccccctgacaggccctggggtgtcatattcccgtgtccatgtgtcctcattgttcaactcccacttatgagaacatgtggtgtttgcttttctgttcttgtgttagtttgctgagaatgatggtttccagcttcatccatgtccctgcaaaggacatgaactcattcttttctatggctgcatagtattccatggtatatatgtgccacattttctttatccagtctatcattgatgggcatttgggttggttccaagtctttgctattataaatagtgctgcagtaaacatatgtgtgcatatgtctttatagtagaattatttataatgctttgggtatatacccagtaatgggattgctgggtcaaatggtatttctcgttctagatccttgaggaatcgccacactgtctttcacaatggtagaaacatccagtttcttttttcttacaagggcaaagatgggaaatctctgaaacatctattctggtttgcctcagaccaaagggattcccaggatgtaggactttcagttttaaaactgggaccgttttgggaaaattgggataagctggtccctctaggtataggtaaaatagcatttagggaatgggaacgtttcataatctgttgggagcctaaggtctggtctctattgtggtccacgggttcagttaacacatttactgatgtcgatggtcagcttgtgggtgacaagggaatcacagctctgcaggttgtgcacaatcgaagagcattgcatctatgggagcaccatgcatacggcagaaattttagggtttccatatttattatgaacattttctggaaggtgacagccaaatatcttgagacaggtgcaccttttgttatttcactctaaggtgctgtaggagttagtggtggccttggcagaggccaagctttcaacaaattccatcttctgtgctgaaaagcacaagacttagggattataaatgtggacagagaaggcaggagaggatgactaatgacgtctattcagagtggcatcaggagagcaaatattattgcataccatgtcactaaatagacagtaatttatgagttctgctggtgaagctaagtagaaaatcagattgcagcaagatgggggtatttgtctgtgacaggaactttgatcaaggcagagaagttgagtgcatgtctgcatgtagactcacaaaacactctttaaaaggcccaattaaaagctacaagttctcctttaggtgacaaattccctgccttcaagaagtctatagcttaatgggaaatctcacgcgagggtacctctattcctcccagctgtgagtctacaatcttggggatccccataattcacttcaggctacagacttccagctgtctacacccgtctccatggtcatgcatgagcttccgggtggctgactccagaccagcaactctcctctaaacttgcagccagctatggtgaagaggcagactgccaggggccatgatcataaccttggtaactgttttcaagaaaactgtgcaacgggtgtaagattcctattaaatctccccaactagtttcatttctcctttcataggcaggcatctttgtttctcctaaaaaaaaattggctgcagcattttaatcatttcgttttttgcttccaagctttgcacatgtagttccctcttgtacacaaccttctcctctacccatcttcttctacttttctctaactcggagtcttatcttttctgaaacttctgatagcttttggcaacaagaagtggcaaaaagcaagtgtgtctccaaagcatttgaactagagttctgttacatcattacatggtgtggcaagaccacgagctttctttaaagcagcatctttattttctttatttatctttctatctccagtgcccagtgttaggtgcacaataaatactcagtcagtgtttctggccagattagtgttcataaaatagaagcatatactatcagcctttagaatttcatgctaagcctgtagtcaaacatttcacagatgaaaatgagacccagagagggaagagtcttgcccaagaccacccagagtctcaggagcagattgaggaccaggttttgactcttggtcaaaggatttttctatagtaccacctgaaaattgctcacttggttgggggagatcctgtattaaatacacaaaaaacccaccatgtgctctgttagaaacaatattgtaagtagaacaataaaaataggctaaaagggaaagactgagtctcttcccttttcccttaatggggaatctcacacgagggtacctctattcctcccagctgtgagcctacaattttggggatccccataactcacttcaggctacagacttccagctgcctacacgtgtctccatggtcatgcatgagcttctgggtggctgactctaggccagcaactcttctctacacttgcagccagctacagtgaagaggcagactgccaggggccatgatcataaccttggtaactcttccaagatcctagatccctccaagatccttggtaactcttccatgatcataaccatagtctcttccatgtgagctctttcctgctggaaaactctcaagtttgaaaccacagcggtcactgatggcttttggccactccctataatggcctattgtcttttttcaatctggaggtggggtggagtggagtgaaacgagcaggtggagcccaggtattcctgttttggtcattatgagttcccagagttgaagaaccccatggatttcccattcatgatttgggcgtgggccagtaattcctcatgcccctccctagaaccatgctcatctgcaaattgaggagctgaaccagaacctttctggggttgcctgtggtgggatattctgtcatcactctgttaccaactgaggagaacaaaccttgtgggagaagcagaggtgtcctcagacactgctcagggggctctgagcagagaagggagcacctggggtgacctgaaacttccatctctatagttataccccattcaaaagctgcctgcctgccatcaccccatcacccacagatgactaagaacaagatggcaacacaggccttccccacaaaagccatacatatggtgtgtccgtcctgagctggaaaatgaacaaatgtttgctcttcattaggctgcatcatattcctcacagctgttccttgttgctttaaatagtcttaatggagctgtaataaccagtaccttctggttgccctactgggctggttccattcattatggcgacagcctgtctggattgaactgggatgaatgtgcttcttccttctctcccatcacaaagtcacctcttccaattctcccttttcttccctaaacctgctgctcttctgactaccatggcagcagttacatgggacacagataactcggctctccagcccacatctcttatattttgctgtgatgcttagggttttgctgtgtaacaggggaaggtgggagaactggagctgggggggaagcaggctggggaggagggaggatgctgtggttcagaatcacatgctcttgactttaataggaagggtatatggttcagaatcacatgccctttcatcagcaggagtagacctgagggttggcagagcatgccaggggatgtgtgtgggcacatgctggggactccatgggttttcttagtggttctcagctttaaaagtatattcacatcaaccggagggcttagaaaacactgaagtatatatcccacccccagtgattctgaaatgtggctgtacactgaagtatacatcccacccccagtgaaactgatctgaaatgtggcctgagcattggtgttttttaaaacttccccaggtaactctaatgcgcaacccaaattgaaggcctctgactgaggctcagatctatctggcaggtgaagttaatttgtcttgggcctccttgagctcctaggagcccaaggcccttggccaattgtggtttttagaacttgagacataaccatggaagcggcagccccagatagtgaggtcccatgcgaccatcagtgggagggaggcccagctggctcggccaattggttcttatttagactcccagaatatcagtgacagaagggttatttggatcactttgacaaacccctttgctcccactgcataaatgtggaaatggaggcccagaggagagtgacctgcctaaggtcacctgaatacttaatgaatgttataggacttgattccaggcattttgactcttcaattcaagatagttcatacattatttcaaataattgaacttaaaatatatattgagagactcaagttttcatgccaacgagaacaagctgattttatggctctacatgcagaaaaagtgcgtaggcttgtctgggctctgggcccagtctcctggtttgggcagccccatattttccttgaattactgtcccagccgcctacctgcctctgttgtccctgctctgatctctacaagatctaaaatgcaaatctactttagaaagtcctgctctcttcgatggctccagtggcttcttgattacaatccaaagtcattagtgtaacaaacactcatcttttgcttcatcctggcccctgttgacagtttcagccccatctccctccatgcttcctcccaaaccgtttctggttcccctcactcaacctgctgtgcccacccctgtgccatagcttatgctagccgctctgcctggaacgcccttcccttctttaatttggttcttcctacttctcaagcttcggttgaggcttcatgtcttccagaaagccactggctatttacctttaggctgggttaatgcatcccacccccaaggattctcatagctctggatatacctctatggtggcattttttggctctcagaataggctctacattccctagcaggcaagggctctatttagttcccagagcctagtacagtgtctgtaccctggaaaatgctcccatatcttaaagttgaaattctgaaaggcctggtcctaggtccttgtctctgtctatactcacttgcttggtgacctcacccagtcttgtggctttaatcatctataggccaataactcccaaagctttctctccagcccaggcttctttatcaaattccaacttcatagatccaactaccttcttgccaccacatggagacactaatatgtctaatggacattgcaaactcaatttaacatgaaactactgattgttccagctctgctttacttgagcatccccatttccattagaggcagctccatcctaccagtggcacaaacaacagccttggagttacccttaattccttttgtaacatacaccatgtgttaggaaatgctgttggctccatcttttaaatatattcagaatccaaccacatctcaccacctcctctgccatgccctgagtcatcgttgtctgtcacctgggttactgcaatgtcctcttaacttgctttcacccttgccttcctaagttccattctcaacacagtagctagaaggaagtaaggtcagatcattagcacttgtcttctcaaagctctgaggtggctttccattttagtcagagtaaaagccaaagtccttataacggcttgtaatgcatagcatggtcaggtccctctttatttctccagtcgaatctcctattactcttatcccttgctcactcttcctctgccaccctggcctctttgcaactgcttgtacatgccagatatattactctctggatctggaactctcttcctccagatatcttccaccatgtctatattccaagtttcgtcatctaattaaggactatccttttatcctttttactattggaacctcctctacttcatgtccctggaacaaatctcccttccttgctctattctttctttttccatggtacttgtggcagactgtattattatccaaagattttctttttctttttttttttttggagatggagtctcactctgtcccacaggctggagtatactggcacgatctcagctcactgcaacctgtgcctcctgggttcaagtgattctcctgcctcagcctccagagtacctagggttacaggcacccaccatcacgcctggctaatttttgtatttgtagtagagaaggggtttcaccatgtcggccaggctggtcttgaactcctgacctcaggcaatccacccacctcagcctttcaaagtgctgggattttcttccccccccaatatttcttgctctgcatgctcctctagaatctggcaactgcccctcctcctcatcaagggatagagtcaaattcccctctcctagaaagtggggagtttttacctgcttacaaccaatagtacatggtaggaataatgcagtgtgatacccaagtttgggccacaacggtgatgcacttttcaccttgttatctggggagctcacctatggagttctgagccaccatggaaatcgtccacctatcccaaggctactacactgtgaagaagcccaggccactgaagaggccatgtgtaggtcttccagtggacaatcccagctgaaagcctgcatcagtcactagacatgtgagtgaagacatgttcagatgattccagcccccagccttggagacttcctagccaaggctctgaacactgtgtagaagaaacaggttgtccctgttgtaccctgcacagattccacagaatcaatgaatgcaagagattggttgtttcatgttgttaaaatttggagtggtttgtaacatagcaaacagtatttctcactgtctaacacactacattatataatttgcttatttttttaagcttatgtttatttcctatttccctttctagaatacaagcttcagaagggcaagaatctttgtttcattcactgttgtatcctaaatacctagaattgtccctgggaatagtaaatagtacatatttactgaacaaattttaagtgattattcaactgaattgaattttgtcttctgatgcagcttgctatggctgagatgtcccttagatgtcaacttgtcaaacccactcatgtgtatgaaaacactgaacagagcagagaagtgacaggcaacaaacagcacagagcaggttggtatgagagtagcactggaggctcaggagtcttttatctgcaataggacaatgattctcctagcagatctgtgactcctatgctcaggaggattaccgagatatcacaggagccttgatgatcaaagcaatccagctgtattctgggctggacattgcgggctagcacattgtgaaatgacttttatcaggcaatattttccaattaaccctcagttaatcagaaaataatgttaactagaagctaagctttacagcttgctgattaatataatttggactaattgaggccaaggctagcctagttagatttctggttgagattcaaatgatgaaataacatgtattgtttgttttctcattataaaagctgttcatttccatgctagaaagtttggaaaatacaaaagggtacaacgaagaaagtttgaaaagcaactcaccacacagggatgaatgctttaaaagaaatattaatctagaacgaaatgcatgaaagtagtcaaatacacttgtaattctgtcttcaaatttcagattgcaagttcttacatatgtgtttctcagcatttggctacttgtccctttttttttttttggtaagccacatatctcccttaatgatatttgaaatttttaatcaaattgttatgactaatgttgaatataccatttcctttctttcttttttttttttcacccaaacagctatttattatccacctcccatacttccagtttcttttgggagatatgccacctggaggctgttttcccaatcctatgttgccttcctcactttcttgctaattattaaaatataacccatcctctgaaggccatgctgtctatagaatcttgttttttttttcttggatatatggcttgaaaatattttctttttttaattattattatactttaagttttagggtaccaaataacataatcttcctgacatttgttcaacaagcaggtctgcatacacacacagaaagcatgctcacatgcaccctatgtcccagagactgggaccattcaaccccctaggaaatgagatccagggatgggtagtgatgagatcatcttcttcaactctaattcgaatatcctttcaagatttgtagatgagaatatgaaaagtgctattttacttagaccgtttttgaaattaagtgctagctctcccaagcttgtaattacttacatccattgacataaacatttttgttcttataaatatgtcaaacatgccccttgtcaccatgttttacactctcataaagttttaggaccagataggtcctgagagatcaccttatccaaattcttcattcgactaataaagaattttaaaactcagatagcaaaattctaaaatcaaacagcttactacattggaatccagctgtctgcacccccagtttagcacaatttcatgacctcatacgacttcagaaatattgctttgtaagctctttctcagaatatagtctgagggataaacttagtctgcaatattaagaattccaaatgtgtggagtctgagccaatgagttttctactgcacacagcaaaactgaatcaagcatagctggggcacacgctgcatgtgaagaaaaaaaaaagaacaaacaacaaaaaaaccacaaatacatataactcagaccatggtacacagaagatactcaaaagatattttaggaaagaaggagggaagggagagacaggaaaggaaaagtgaagaaagaaattcttgttttcaaagctggctgcagctggagtctaactgcaaccaggagagttgcagaattattcttggagagtgagctgctctttggttcagaaaaacgtcttaatgcattttccttttattttattttgctttttgtttgtaaaacgtgaggcctaatgggcaggatttgaaacaaaaagagtgagataaagaaagctaaattgttctgcaaaataaaagaggaacgtggtgccctttgtctggatgctgaggggtgggggtggaggaagttttgaagacagtaaagaagactttgaggagaaattagatagagacctgtcaggagaccagaaccttagaaggccttaccagcaatgtagatggttaaggaacttataagaagaacaacgttgtattgagctgctgcctgtcctttactgcagtccttctctattattccccaaacctcggtaacaaccactacctgcaaatcctttgtgttagggatgctttggggagatgggaaagggatgcccagtgcagggtgaagagatggtgcagaaagagggaactgtggtcactggagatgaagcattgccttcgggggatgggagcggggaccagaataccacagaagcttgagtatgagacaagaggtgaccaagggcaagcatgcatgctggaaatcattggcaggggagatgtgctggcttttctacagcatgtgggatgggagcttgagccattctggcatagtgaatggaggtgagactccaaagtgcagaaacgttggaggtaatgaaactttggataatgaaaggggaaggggagagaaacaagagtgaaaaaggatgtcttagaattatttagcatggtgcttctcaaatttaatgtgtatacaaatcacctagtttctggttaaaatgcaggttctgattcagtagggagggatggggcctgagatgttgcatttcctacacgctcccaggtgatactgaggctgctggccagggagccatactttttgtagcaaggctttagtgcccaaataagcctctgaaactatcaggaagtttccccacaggctggtctcttacctcgtattcctccttgaacccgtagccctggcctctcttcatctgcgtgatgtgctgcagcaagtcagccacccggatggcgggttggaactggtcccgggggtagctcatctccacagggtcacaggtgcggtagggatgagtctggatcgtgagggtgggctgggaaagctccccgcggctgccatctgcttcgaaaagaaggaggcagaacagatcatcacctatagaagctttgccctttgtcctccctgtctcccccagcttggcctgaggagggcagagggaaccaacttgggactcaactgatagggaaactgcaaaaggattggagatacactccttccctggcctggctgtgttggtagatctaagtatcaaacccacaagcaaaccaatgaccacaacacatttcaagggcacagactgataaagttccaggttgttcatcatccccgtctgtctcagtccttcgtttagactttgttgggcagaaccactaagaagctaggcaggctatttattgggagccccctcctgtttcggaagcagagaggctggaaatagtgcctgatgcctgtctgcaggggaggagagcctcaggtggcctcaggtactcgaagattggagtcacatgtataattctggtctatttgcctgcatggctgtgacctggcttctctactatttttttttcctttgagttttaccctgggaagaattggggctagtcttggactgccagaagctagcagggaccctgaccctcccagctgctctctctagttatgagctctgccacagtgaccaccttcttgctattgtatagtttccccatcacttaatactattaatccagtggcatcactgaacccactttgcagatagggaagcctgggcctcttccttcagtgctgctagctactttccccgggcctggatgctatgtctcatcgccttcataaaatctctccctgatgtaggatctatattctctcttgataaaaaccttttcatccaatgagttgctttaactgccttctgtcagtttggtcaccctgaaaactgatgcctggtcagattgggtttgaattcttctgttccccttggacgactagaaccaatttcttgcttaccacctccctgccaggcatacattcttgatctctcagggccagtttacctttcccagaaccatctaggcttggtcttcccaacctccttccaaagacatggacagtctatgccccagaccatcttgtttgtggcatgcaagagatgagaactgccagctgcagcagttaatgtgtctcccccagatgttttcagaccctgcaaaacacctatgcaggtacccactcggcctatgccatactcattccctgggaggtttagcatatattcccaattttctgcaacttgtcttttcaaaatccatgtgcccttcagcttatttgcctgtcatgttggaatactccatcagacatggatcctgtgtgtgaatgcacactctacttctcggcagcagcatcggcaagcctgttcctggcaaggaaagataatggaagggaacacctgaccttcctgctttctaggtgaccaacttgtcccagtttgactgacaattttccagttttaacattgaaagtacagctgttgggaaacctctcagtcatgggcacacaggaatggttggtcaccctaatgctttcacttatatctgtggttggagtaggggataaatttttcactttgcagccttctgcctgcctccacctaccaagggaggagaggctactaatctgactggtctgactttgagacactgatggggtcgtacctaattagtaggtggggtcatcgtaggcagagtgtggtctctaaaacttcctaattcagggtggtaggtaaacatctccaaaggagagactgtcctttggggaccagccaaataacccctggactgcttacagaaagatttctaagatttagatttatgcacaagaaagaagggcctaggcaagtcgttagcaaaaccttcctgactgcacagagaaatactgcttactttttctcccgggattttaggtaatagctagtacatgttcactggcattgcttaaatgtaccacttggcaaacatgggggtgttccctttctccatcaaccccttggtttcatgagttcgacttactgagaacccactctgtgccaaggactatggtaggcagtggcaatgcagacagaaatactgattccaccctcaaggcttgactgtctagcaaggaaatagacgagaagaatcaactgaagaaaaaggacagagcctgagagatgaaggcacatgtagttaagaacaaggaggttgataaggagtaaaagctgtgggtagaaatgtcaggggagggcaacactgtaacagatggtgcaaggcagatccagagactgtgaatgtgcaagacccttgaagccagtgtgaacctgctgaagggttttaggaggaatctccttctttaaagactcacactgtttcttgtaggtgtcccagctgtcatgaatagctctcatcgaaggcatccttccagcgaatatcactcctgtgatggtgtgattggaaatggagaggaagggagcacttgtgtttgattcatctagagatggtacaaagctatggcaagagccacagaggtatggatgctgcatacctaaagcttggagtcatgccatactctatgatttctatgaaaggatgagctgagtcaatgctaggaggcctgtgagtatttcccaccaaagctaccatcaaacatggggacagttgtcttcagagacccacagtctcccagaggaacttggggcatgggctgcatgggagaccagctgcctgggaaagacaggcttcctaggaatgggaacttggctttttatgtgtgtgagaaatgtcaaatgtttccaaaaccaaatagctgtcaatatggatattttccctaaacacattgctagacagactgtaaacttggtgtcagcaaaaccaacactggaatggaaaataaatgcattgaaatttaacaacttgtattgctgtaacatttgcaataatgtcaatgccagtgctaatgatgctatgaagactcagaaccaagggattttcaaggtttattaatccaacgggttagactcccctttccaaagtatcttacctcacctattcccttattaacctctgataatgcagaagtgatgtcttttatcacactccatttcaccagacgcactatacttaattttccatcgttaggtttaatgaaaacccaatttcacaactcacttctctcaggaacctacaagtaatgctacgtttttatcaggcccaattaaaagacgttatgatgttcctgttcaagagggagccttaaaactaatgtgcgattctgctgctaattcaacaagggcactggaattcacacgctgctcataaaatgtaactcacaccagctggcccagggacagaggatttttcattttttctcctcaccagccccttaattctcatgccttcttctgatttatgggtttggtatgtttatttatcgtgcaataatattttggatttctttcacactttttatatagctgttacctaaccctgtgaattcccctgcagtaactcttgttactgcccgcgaggagcttgtgggatgggcagaaggattttggtgctgtgtatgagattttgggttactgtctcactgatttcctctttgctgtcttcctgctctctcctcctcttccttgggatcctagattcatcaccgctgctgcccacccttatcccctgccccactgctaccagccatatagatctccctctacctttagtcacatatttccatcacttactgggaattgccactccaactggttaagaaatatttaatgagtacctatactgtacaatgcacgttagatattgtgttcatacagcagggaggtatgttcagggagaaataagcaggccacagcccttgaaggaggggagaagaaaatataaggtgtgcgtgaataagcctaagataggaagagacaggcccctaagagatggaagaaggatgtgccatggggtttggcaatctggaaacattctccaagcattaggcattcatgatccacctctgtgtctcttgccatagttgtgtaccatctatgtgacagctgtccaatagaactttccacaacaatggaagtgttctacatctatgctctgcaatttggtggccactaatcacatgtggctactgagcgtctgaaatgtggctgatgagacagaggagctgaattttaaattttgtttaattttaattaattcaaatagaaatatttacaggtggcttatgtctactatattgggcagtgcagatatacagaaagagatagggaaagaaagagagttctagagtcacacagtggggcaaagaggtctagaatagcactggccagtggaaatatattgcaagccatgtatgtaatttaagatggtcttgtggcaacattaaataaggcgaaaaagaacacatgaaagtaatttcaataatacattttacctaaccccatatgtctgaaataatatttcaacatataatcacaaaaattattaatgctatatttttacattctttattcacacaaaagctttgaaatccaacgtgtattttacacttacagcacatttcaattcagactggccatatttccaggattcaacagacactggtaaatggtaggctaatgtatgggacaatgcaggtgcacacagacttatccagagccagatcaagttctaaagagaggtaatttagagctggagtaaatgctaaataaaaagacactgatccagtgtaaaacagctctcacccagcactatccaaaagaaccttacacattgacaccaatgttctatatttgcactgttcaatatggtagtcactggccatctgtggctattgagcactttgaaatgtgcctactggtgctgaggaaatgaatgtttaatttaattttgatttatttcaatttaaatagccacaggtggccagtggctactgtattgaacaatgcagatctacacaattacatcttcaaaacttttcttcagataaactctcaactattttttttaactttgcctcattatgaatgatagtgcaacataaaatcatgaatgtgatgtgctaattttgttttagtgctcactaaaatgtttacataactatttgagaagaagtcggggccaggtgcggtggttcatgcctgtaatcccagcaatttgggaggcctaggtgggcggattgtctaggtcaggagtttcgagatcagtctagccaacatggtgaaaccccatctctactaaaagtacaaaaaaattagccaggtgtggtgctgtgcacctgtaatcccagctacttgggaggctgaggcaggggaattacttgaaccagggaggtggaagttgcagtgagccaagatggtgccattgcactccagccaggggtgacagagcaagactccatcttagaaaaaaaaaaaaggggggtctgttcatgttgcatgaggggaactcaatctgcaccctgagaaatgttgagtctgggtcccagaatcagatagaatggggtttggatcattccttggccaagtgacaaatctttctgcatctcagtttctttatctataatacagagaaaacacatgttgtaaggattcaaagagatagtgcatgctgagtgctcagtacagtgtctggtatccaggaagcagtaaaaaccagtatttgttctgatgaatttgtgcataatgtcatattggacatatgagaatccacacactagagatggcatctagggagtcatttagggcttctttcgcctttccttgtctcctctctgctttcctttatgacacaccccaaagccatctattttactccattcctgctgctattgccctcattcaggtcttcatgacaggactactccatcagtttcctgatggcccttccttctttcacagttccctttacagagctttgatcaagtcatttttcttagcaaaagtcttcagggagtcaagacaaaatttcttaactagctaatcaaattcctgtagttccttaccagtatcaatgtatttcttctatcactattcatcctagctccatgtgctctttagggcaggagagtatgaagagtgatgtgtaagtagctagcgactgctcattgagaggagagagtctggaagaggagagaagttttgaggtgaagaggaggctgggtcacctgcacagagtggggatgcaactggaaccaacactgtggggactgtggcaacagcaggtatcagagtcaaagcacagactcactctgaagataaaacattggattcaaatgtgatcttcacagatttctagctataggacctcaaataagttacagctgacccttgaataacatggaggttaggggaaccaaccctctgtggagttgaaaatccatgtataacttatgacgccctcaaaacttaactactaatagcctactgttgagcagaagccttattgataacataaacagctgattaacacacatgttgtatgttatatgtgttatatattgtattcctacagtaaagtaagctagagaaaagaaaatgttattgagaaaatcataaggaagagaaaatatatttactatttattaagtggaagtggatcatcatacagttcttcatcctcattgtctacacattgagtagactgaggaggaggaggaggaggaggaggaagaagaaaggttggtcttgctgtctcaggagtgacagagtcagaagaaaattcatatattaagtagagctgtgcagttcaaacccatgttgttcaagggtaaccatactttgagcctaaggtctttatttgtaattgctgatggtgatgacaatgatcatgattgatcatcatcatcttcttctgagaaggttgttgcaagggttaaatgtgattccactggaagaaatctcaaggtggaacctggctggcagtcagtgcctcccctcttctccctcacaaaatactagaaaaggctcaagataataaacttgtaacagctctgaaatctaagtctatccactaacctattgccagaatctgggaagaaaacttgtttattattgcagcagcacacatcccatgtgcaggaagatatatatttcaactgctaaaaatttctcgaaaatccctctctcaattgattcaacataatctctcaattgattcaaccacaggtagtttcccctccaacgctggaagtgattacatttccttgttgaagcataagatgaagcagttggcttgtgcttaggagtcatgttgtaagaatgctctgttctgtgtttctgaattctagacttgcactagcataggtgtatgagatttgtgacccctgaggaacagtagattcacatcctcttactcaatgtaacaacagatggatttaccttttcccatctttcttatgtctgaccaaacacatagtagggttgaacttgtagaactaatagtaatagaatgccactccactgtgccattttctatggagctgaaacaaacatgatacaattgactttgatagactttgttacttgggataaagcaaacccaatggcctgaagaacagaaaagaaatgcttccaattttctcattttaattcctgagctcagagaatcaaagactgtatcaaccatatagcagggttggggcatttccaagctctttctcctcctaaacctccatcactggggtctttgacatggtaaagacaaaagatggtatctttgtttccgagacgcagattcagtgttaggaagcaattgtgatgggaacagtcatgggaaaatgcttctaggattcatttactgtttctgataaagagatcaatcctcctgcttgtgggggagagtatgaattccttctttcacagcactcacaccagatggaaggatggtgttagacactctatgtagggatgggggctataaacatccattgctcctcttgcttaaaccactgccagaatttgggaggaatattgatgaattatagcagcatcacacatgccaggatggtatggaataaaaggattccaacaataactagttggacagtgaggcaacgatgaggatctacctcctctatttactggcaagcaacaggtctggagagacttctcttcctttaaagttaaataaacagaaacaagataatatgaggtcttagaagaaaatccaccatgttaacagtaaggaaagtgatagcctggataccgtgaaaagtacaattttcaaacacacacacacacacacacacacacacacacacacacacacacacacaacagtcagtattgactgttgacccaagagccatcccctgtcttgttattttctggctaagttcaccgtatgacttggtgggggcgggggcagggaatgaccctactcccaaaacaagggacaaattctgatgtccctacgccatcaaggtgttccgataccttttgcaagttaaataaaaatcttttatatgatatgggagggaagttccattagaaggcttctaggaaaggttctcttatctctaagaaggacaatccagtggcccgtctctgccaccagacagtaccatgtctgtgtgtgatgcctggaactgctgaaacaatcttgcatccatgaggggagctgggctgaggttgccctcatgccaagataagaggatgaagaggagagcttgaaagaatgtgggtcctcaatgacattcatgggcatctcattcaaccaactctaacacttgacttcctgttctagaagataatacattaacttgctgcttaagccatttttattcattttttttctgttactggtatcttaatctaaacaacagaaagtagaagtgcattttaggttccttgaagtttattgaaaacgaaatgcgagaaaagatagaagaataaaggaaattaaaggtgaaataataagactaagacaacagacttttcccaaaatagatcaagttaagaagtagctagaaaaaatatttactgggtgaggtaagaaacaattgtaaagaaaccaaaatgcaataccagaattaaaatgggcactggaatctgtaatgagaataagcaacaggcttgtggagaattaatttgaaaaacttggaaattaaaacgcaaggaaagcagaacaatacaatgtatatttcctttgtatatatcatctgctcatgtgtgttcatgtgtgaagggaacaaaaagacatttttagagaaaagaaaacaaacatataaaagacataattgctgttacagaagaacagaataaatggaacagaagcacattatgtgtcctttcttatcaggacacaatattaaaacaactcattggcaaaataaaaacttaaatcttcacgtgtaaagagttctccacctacaacttaaaaatagagcctatattctgatacaattgtttaaatattattgatgtagaaatactcagataaacatctaggctggaaaatggctatgtataaaaaatcagaaactacgttactcatacattttcttgcccaaatttaaattccagaaaacaatgaaacaaaatttttcaagtaaaaatgatgtggctaaaaaattatacagtaaatagtttttcatttgcgaagctacagaaaggcattccctgacacataaagaataagaagttatgttggctctgattcttttccagagggttgggtagctgataaagctagtcaaggatgtgagtccagaaatagagaaaaaaacatccacaagaatggaagaagtcttgttataaaaaaagttgatttggtaaacacagatatgagtgtaaaaatcacaataaatgtgaatcaaaacagaatgaactataagaggtaatgcttaaagagaaatcagatttaaaaatctaatataaaaattcttggctaaaatttccaattgtattaacaaaaaccaggaagtgggtgactgatacatcactaggaataaaagtatattatcttcttcacctttcataatggatattcaatgtgtactatttcaatcctgacactcttaattgaagaacacaattttaagcgaatgtgtatgtactgtacagggtactgtagaggtgtgcatgtgtgcgtgtgtgtgtttaaggcatcaactactagcataacaagaagaatgaacaggattcaaatagagataaaaaaacaaaacaaaagaaaaccctgacttctagtacaagtgcatctggcatccaaattttgttacttgtttgatagaagcacctgccaacatagaaatcaacattaaaaaaactgtgtaataccactgaaaactacactgtcctgacaagcaaatgagaaatcatcctgtagaggtattttcataatccaaggcacattaattcccacagaacaaaactgcctccactaaagacgaactcatagtaaaaaataaattataaagaatgacaagagccttgtaaggaatcttatccccataggagagagtcagaagtcatcatacacagaaaaatacacctctcaagaattgaaaataataaaacaatcaaagagactattaagtaaatacatttagattgattaaagagaaaaaagaaggaatatgaaccattgcaataatgcacacatgacagaaaaaggataggtgggtttgaaaaatatacattcaacttcttgagataaaaaaacatagtcattgaaaatagaaagaaagtaaatatgtatataagaacagacatggaacataacacaagttaaagatacagcagaggagctgaaaaaaaacagcaaaagctggctctttcctttgaaaacaccaacaaattagacaaacctctgccaaaaaatgattaaggaaaaaagacacaaataagccacttcacagttgttagagactgacagaacatttttagcccaggcttagactggagaatgattaatgaccagagaagccctgagacacatctcaagactctgatggacgtggtcagggtcagctggtaaacaccagcccatcacctgggtgctagctttttaaaaaagaagtcatattttgagatcattacagattcacatgcaatcgtaagaaataacataaacgggtcttaaatacccttcacccagttttccccaatgttaacacttgtgtaactatagtacaatattataaccagaaaattgacatatatgttactgatcttattcagatttcattagttttacatgcgcttgtgtgtatgtttaatttatgcaattttatcccatgtgtagacctgtgtgaccaccatcacagtcaagatgcagaaatggttacatcacaaggacctctcatgcaatggaacactagcgctgagtttcttctttctacactaagacctggttactagattctgggagactgcagcaataatgaaaagaattgtctctcagtgaaatgccaaactccgctagggatcgacaaactgggatcccatctttcctgatgctcctttaatccaggcttccacaggaccacaatatgtggctggtcatacatgctgtgcactgttcaattttagagggtgtcattcctttgacggccttgctcttgtgatctacaagggccatcaatcttgacttgttccagtgactagcggttattattttcattttgagtaaatcaagtggaaagtttcacccatctggtctagagaggaagcaataagcaaagcatcagtctatggacttagttccctaagagctgaggcagagttaggaaaggagacctctgttcagagattcttctatgtgtctggagtgaactgggccacaataaagggttttgtgcatgtcatgtgtgtggggagtgtgtgtatcctggcaagcatgtgagttttcccttacctcttctccaaccagatataaatggctttttatctgttttagaaaataaacatctaggtataattttgttcaaaaaagggtttcactattttttaaaaaactttcaaaataatttttttctttttgtcaaaattctatcaaaatcagtgaggaaagaggcagcaaaaatgctgataccagtgttccacagcataggttgtataaacaatacatttggaaaaaaaatgaaaggtcgttgagtttgccagagcaacagatgtttagtagtgatagggattctctgtggctggccttaaccacttagtgatcaaactaggaagtgagggaataaagctgaggggcgtgcatggaatcctggaagtattttgttgcaccacaaagaagaagggatataattatggactttttaagtcttttaactcactggaaatataagccctttttggtaacatgtaggttgattatttaattcttgcatattcaccatccatttatactttcagagacacttgttgttgaaaataatggccttaaaaaatgctgaactttgaccggtagaagaataacccataaatagacattgaaatatacgcctaaagaattttataaactgatgataaagtagagtacaaatattggttggcaaagaatggattcccagagagtgtattatttttcagaagagaatgaagtatattaaagtagatgaaactgtaaggtggcttagtgttagaaagattaatattattggaaagttacttcatgctttcagtaagaagttctgcatgtgactatggcttgttaagataaatagcatatgcaaaagaacttagaagaacatgtcttggtcagtaagttactcaaagcataaataataaagaaaggtaaatcacacagttttaatattcttgcaagcatgaagggagtgataagggtgtggcatttgagaggagtttatatggaaggaaagactgggattaaatgaggaaggatctgagttatagataaagggattgattgaggcagcaagcacaagaaatggaaagcgactctgcatgtcagttctgtgtttcacagagccactaccagcataaataaaacccggtattgatagatccatgtggactcacctgcccctattctcaaaccatcacttaaaggaaaacttgggcaggtgaacttatcctcaaagtggggccctgtgttgacagggactgccagcaactcggacagtcttctgccttgaaaattctagagtgtttgaagaatctgatatattgaggaaaacggcaagtccaataggaaagactgagaggctcacacaatactctctgaagacagggtagtggtctaacacgtacagactttggacatgaatagggctgagtgagaaccctgacaccatcacctactgcctgtgtgattttgggcaagttactcaatctctctgaaccagtttctgcaaagcctttatggctagtatctctgaaaactggagatagaaagagaaaatcaagcactgatttataattgttagaagctcaacacatcagaggttataattgttagaagttcaacacatcagaggttaatacaacagaagaagagatagtcatttctctccatggccaggatcctcaaatctgctgcccctctctttccctatccatagtggctgaaacaacatccttacaactccttgaatcccctcttccttctccatgttcttttctccaaaataaggcatgagaactttttcaaaggccaaagctgagcatgtcacctccctgctcaaactttttattggatgcccactgtcctttggctatgttccagatttaagatatttaatatggcttcaaggctatgattggtctagctctcaccaatctcatttgcctcatcttgtgtctctctgtcctttcccctctaggctgcagccacactgtctcctcactgaattctcgcccacctgagaatctgtacaggacgtgctattctcctggagtgtttataacttttcccccaaacttccaaggccacgtggactcctattcatccttcagcactcagctcaagtcaattcctcctctagaataaacaaacccatctgtggtatgaatgaatggtggttaccaattgggttgagtaggggcaggggatggctgggaatgggcatgagggatcttcctggcaagtctgtatattactagggggctgggttgcaaagtgtatgcaattgttgaactcataaaatggaaaacctaagatttctgtgtttttttgcaagtaaattttatctcaaaggaaaaaaccagactcttgagtcggcattaatgatgtgtacagttaaatattgggaggaaagggaagtgtagtgatgtctaaaatttcctttgatatgcataaaaattaagatggattgaaggatggatagatgggaagataggtaataaaataaatatagtaaaatgttaatagtagaatctaggggatgactggtcactaaaagtattttaacttttctgaatgaagatatcaaggaagacatctctgtctgcctccatccccatctgagggtcccatgttatatcctaacagtatcattttcatgaattacaatatatgtatattcctgaacatacatcgtcttcatgaattactatagttattgaataatagtgagattagtatcttatccttcaccggactgtaagctccatgaagacaggtatcatatctgtgttgtttactcgtgtatctccagaatctagtgcctactctggaaacactcatttgttaggtacaccttgctctctgaaatccaccctccaccttgttgataaatacaatgtttgtttatcttcaaggttcatctgtcatgtcttctaattcttttggtgaggatatcatgatctctatttcctgcctcagttccatttgccttggtgagtgtggggaggttgataagccacatttactcaaaatgcatatcttctcctgatgggcttctggtgattttaactacactcagatccgaagctcttctctcagagtgaaaatgttcagcttcactgtggctccaggggactggacatgatttggagtttctcattggctccagggttgtatgtgcactgaaaacaactggcccagaattttgtattatgtatatatcaccaaactccataacctgcacacttatgggaagatgtgtgatagaaggaaaagactaagtaatgcctcacactgaaaatacagactgctcctattttctatctctcattcataaaaattataataagactaaggaatgcaaaatagttgcagagtaatacttagctaaactagaaaaactcaattttgacaggtttttacaatcttcagcctgacaggtgactttgtcttttgttgatgtgcaagaaagagaaaatgaaataactaaacttgtctgaaagatgaaatttaaatgtgcaacagatgtttgaaagagtttgccattgttgtgggtggataaaagcttcctttctccatttcaaactatgccctggatatttaggctgagtttgtggatattatgaactacaaagacaacgggacattaagacaatggaaagaacacagtttgggagttacaagacctgagttttcatcctggtgttaccactaaattatcttgcacaattaccttcacctttgtggaccttaattttaaaaccaggcagctgaattagaccaatgcttctcaaggtgtaatgtacatatctagagatcttctataggcagattctaatacagtgggctgaagtgtggcctgagagcctgcatttgtaacaagctctcaggtgatgctgatgatgctggtccatggaccacaccttgagtagtgagggattaggtggtctctaagggagcttccagttaaaagatacaatgtgttctttaaaggtcctggaatttctcttaaaaaagcaaacattattctttctgctcttactgaatgaatgaagtagtacagcttagtattgttcaaaaccaaccaaaaaatgcaactaattaaatctgatggccttaaccctggaaagaacagatacctaacactctcataagaatgaataaagcagtgtgtccccatcaaggttcagcctggctgatcctcaggtgctgaattatagaggctgatcactgaaatgccaaactactttgttttatatagtagattccaaatgctagtaccgtacaagagtcattcaaagaacatactaaatatagattcctttgctccatattctagacataaggatttagtggctttagtttggggccagtcatgttttgggaactactgttataaccattttatgggggggcaggatagcacctagggaagaagaatggtaagtttgacccaattccttattgggaacatggtaaagatctttctgtctgtctgtctccctccttctcttctcccttccctcccctccccttcccttcctctctctcttttttctttctttcctttctctctctctttctctctccttccttctttccttccttcttttcttttctttctttcatggagtctagctctttcgcccaggctagagtgcagtggcatgatcttggctcagtgcaacctctgccacctgggttcaagcgactctcctgcctcagcctcccaagtagctgggataacaggcacctgccaccacacccggctaatttttgtatttttagtagagataagatttcactgtgttggccaggctgttctcgaactcctgaccttgtgatccacccacctcggcctcccaaagtgctgggattacaagcgagagccaccgtgcccagccagaagatctgtttttcaagcctgcttgccagcctctgaagaatcctagtgattctcatagtaataaaggtgtgcaagtcataagggagtcaatgttacagggaaacagtccctgaatagttgcccttatgggatgtcaaagctttgaggatccctggcagctgcaatgagaggtctggactgtaattcctatcttcttgtctattgaaatgcatcagaagaaccagggttaaatcctggctctactacttattagtcaaaggctttgggcaaattaattaacatctcacatgttaagccatgtattagttatccactgctacttgacaaactacccccaaccacagcagcttaaaataacaaacatatacgatctcagtttctgcagatagaaatctggttgcagcctagatgtgtatctctggctcaaggtcttttgtgaggttgcactcaagctgaccgctgtggtaatgatctcatctgaagactcagctgggagagaattcaagttaactgatttcataatcactgacatgatactgacagattcattttttcatgggctactgcagtatgggactcagttccttgctggctgttggctgggcatctccctcgatttcttgccaataggtcaacttacaatatagtagctagcttcccaaggaacagacaagtgggagtgagagagagcacccaagataaaagccacagtcttcttaaagacaaatcttgaaagggacatctcatcactttatcatatcctattcattggaagccagtcactagatcttggctgcaatgaggaagggcgttatataagaatgtggcataggaggcagggatcattggggccatcttaaagtttgccaaccacaaatcctaatatcattctgcaatgtttttgtgagaaccaaaagaggtaatgtcgatgaaagaacatttaaatatacacatatgagagtatattataataattcattccaaggagtccagtcaaaatcttccagctgactttgcttagctttgccaagtattccaaggcattcacttaataaaagttttttaattcatgaaagcttctaaagtaccctctttacacttttccaaagagttttccaagatctgatttttcaaggaaagtaaatggtttaattttccttatcacatgaattgccattgacaacaatctttaatcgttaaagagttaacaatgtactttcaattgctttacgcagataaaaaatccattccctaagacaatgaattagccacataattgacagccaattccagtaataaaacgctaattaagtgataatgctaagtaaaaaatataatgtgatgaatttgctaaacaatggcctaactaataaattttcatgctaaataaatgatttggaatggtgactaaaccctcaccacatttagggtcagttgaaaaagcaatgatgctttcagaaaacaatgacagaagtgactgtgccagctaacatccttaacagtattacactgggctctttgccaagcagggccaagggactaagtctgaatggggtaggtgtaccggaatctggggggctggagcaatcaccatgatgatagtatgggtgactagcctaaagaaaggcatggaatagccaagtatagccagctgtagtaatagcagaacccagcaatgggcaagaagatgcagaaatcaatgctagatcatcttgagctaaagaagatcagggtcagcaccaaggacagatcctggatgcggtggctccgggaagattcctgcagatagacgtgttttgtcataaacaaggaagtcaaagattacagagttttctccttaccccagaaggctaggctagtggtgagactcagctctcataggcacaagggtcttcactattttttggaagcaccatggtttcaacccatttaatttacaatggtaccttctgaaaggatctaaatttagaggagaagtccatatttcttatgggttccactggttttgactgacctttacagctggaacagggttctagcttccacatatcaggcacatgcttgccttgggagcctctaatagagacactctttcctgacatggctcacatctgttacctttttaaagtctttagtcagatgtcatcttctataaaactgcaatcctcctccacttatgactcctgatcccattcagcatgttctattgtttcagtgcaccctcacttgttattatgtcatatcatataatgtacttatcttttgctgtccattgcttatttcctgtctctctttccacttcctaccatcaatggaatgtaagctctagaaagacagggaatttttaatttctgtattcttcactgatgtatattaaaagtgcataatatgtcaggcacatagtaggtgctcaacaaaccttgttgaataaatgagtggcagcatgttcagaagcttgttacactctaacctctgaagagagtagtgcaatcttagaaatcagtggagtaaacaagagcctatatcctctgattttaagacaccactgtcccagtatgccatcctcttacttagtggcttcagaggtgtccgcatatttctcactattcgggagggagtacattatagtagtaggatcatatgcaagagaaagattaagtttaaatcctagctctactactaatagctatgtgaccttgagcaagttatttaatctccctgaacctcaatctccacatgtgtgaaagaagcctagtaccaacaataatcatcaactcataggttttaaggattaaatgatataacgtatgcacagcatctagcatagtccttggcacacagttagggctcaataaatattagtttcttgtactttcccatttaaatacaatatgatacatcccttaatacataagagtaaattgacttttcagattatgccagatattgggaaggctcacaagggcatgaaattggagaagagtaagctgtgactggggaagtgtaaaaggctagaagcctagagccctctggaggagagaggggagatcacaagggtaggggcagtaggggacacaaagtgggtctgaagagtgttccctctgttttccagggctacactgagtggtagagagtccaaggaagccagtatttggtgatggggcctttagaactgatgactaggacaaagatacaaggattaggactttctaagaaatggaggtgcaaagtgcaccatatatctctcccagactagtgcaatggtcccctcccttgtcctcctccctcaaccttcctctatgggattaaaatctaagagtaaccctagtcatcgctatgtctgcaggtcctcattgtcccagcaatgcataagatcagttgactgaatactgaatagtgaaagtgaaccattgtgatctatcctgacttaaaattagcataatgattcattcaacaaataccactcaatcgtattcataggccaagcaccatactagtctccagggatatagtagaagcccggacagaagttgtctatgcaatcatggtttaaaagtctggtgaagatgacagacattagccaaaaaattattaaatgaataaacatttgcatacaagaaatttctgacacatgctaagagggactagaatgtagtaaaattaaaaaaaaacaacaagtggccactgtttagatagacaatttagggaatccctcaaaagaagacatttaatcatagacctgaaggataaaaagtggctaaacagtgaaatatagagtggaagactgttctggaaagagcaaacagaattgtgaaagccatattttgggaaatgcttagtgttttcaaagaataggaaggaggtcaatatgactggagtatattgagcaagacagagagtagccagagatgagactaaagatgctgacagaagtcatgtcattctgagccttgtaggccacgaggttaatttttacttcatctggagggcaatgggaagccaataacggatttttggttgagcagtggcattgtgagtttgttttttaaaattgaagaacacgctaggcaaatggctatttcataaataaagcataacaaagatagtgagttattggtatacttctgctgatggatcaatatgaaaggagaatgatgggatagaataagaagggttacagagagggtgacagggaccagatttgcaagtgtgtgtatttgctagaacacagctggctgaagattcactggatgaccatttgggtctccactgcagaagagacagaagtgactgttagtttggaatgactcctatgttctgagcctctgtcatgtctgtacatcagtgggaatttcatctaacctagatcaaagatcctgaagataaaaggtttcaccttggaaaaactcaactggtcccatgagacattaactgaataagaacactcatttcaaagtcaaacatgtccaaaaatttccaggtatcacaccctcaaaatactgactaatcaatacaatatggagcaagcagggagatctagtcaatacactcggcttaaaaatggtttcaagaatggaatgccgtagaacaccttctctctaccattgcttcattacagagagttggccatacccgttgggttgtagtgactgttaatcctacaagcaggggtgtgtgtgtgtgtgtgtgtgtgtgtgtgtgtgtgtgtaatcagatttccatgtgcaccagcattttgtgctgtcactttccttgaagtctgatataggcagaaacaatacttacttaaagctttatccactcccactctccaaaacttttacctcactatcaccaagatgatctttctaaaaccgactcaatccttcctttctacttcttaaaatctatgttagctccttgcagaaacataatacatttcaaactccctagtattcgagaccccagttcctgcttacctcttcaggttcatcttttaccacttaatcctatggttctaatatttcaagtactacagagaagccaatccacttataattttaagtgcaacataaggaagggtcttcctgggaacctaacagcaaggaagaccaacaccatggacagagacgctaacaccgtcccctgcccttcaccctgtctttcaggatataggaagaagttaacattactgatgtcttttggactctggatgttagggaatacatttatactcacaaggaattgtacaagagagcaaaagctatagatttgtaaaatgtgcagagaccacaaaactacttgcttgtaatagcagaattatcacgctaatccaagtggaaaatggaggttttgaaaatattcctattattgactatattagccaagtagactttcccacctctatgcccctgtatatgtattcttttattttagaataatgtcatagcttgttaccaggatgaccacaattgattccttctcttcctatatgcatatgccatttttcctatagaagggttgagtctgctcctctactcccttaaatttaggctaatatgtgactgcttttaataatgatacacagcagaagtgaagctggctagttctgagcctagtttttaggaggactagcatttctcctggctttctcaaacacttgctctgggggaagacagctatcatgcaagaagtacaattaccatgagtctgtcctgttgctaggaagcctaaggtagatgtatagggagagagtgattccagcctaccctagatgttacagtcattttagcataggggttgaatatgcaaatgagggaggcatttgggccttccatccctgacagatgccacctaaggaagaactgaggtcccagacatgttgtcctacaagagctgtcacagtcatctccagccattcaagtcatcccagctgaggctccccattttcaagcagacacaagctatccctgttgtaacctatccaaactcctggcccaaagaattagaagccaaatacaatggttgttgttttacactgttaagttgtgatatggtgtgttacaccatgtcacttatttcttcttttctgcattgactaattctgaccacacagtgtttaagattcaacttctctatgatgttttctttgatcaccttgaagtaccttaaggattctatttcctgctggtatttctttcctttcctttcctttgctttccctccctcccttccttcttccctcccctccccactccttcctttcttccctccttcctccccccttcctcctcctcctcctccttcttcttcttcttcctcttcctcttcttcttcttcttcttattcttcttcttcttcttcttcttcttcttcttcctcttcttcttcttcttcttctcctccttcttctccttctctctctctctctcgatagagtttcactctgttgcccaggttggagtgcagtggcatgatctcggttcactgtaacctccacctcctgggttcaagtgattctcctgcctcagcctcctgagtaggtgggattacaggcatgcaccaccacacccggctaatttttttttttttgtatttttaccagagatggggtttcgccatgttagctagagtggtctcgaacttctgacctcaggtgatccacccaccttggcctcccaaaatgttgggattacaggcatgagtcactgcacccagctcattcctgctggtattaaactcatcctggctgcttctcacctagaagaatttgatatcctatcaactcatcgtggcttcctctcacctagaaaaccagcatggtccaaatatcttcctttttacctcacagtttttacttcggagtttcaataactagagaaacatcttggctgccaggacaagtggtgtggaaaagccaggtatccatgaccacatagattaaacccatgtaacaggtgcccatcatctcccagaacctcctcagaatactgttgtccccatggctacctgtagggtcatccatccaatcaagaatcacatctgttgttatatatgcttctttcctttactatttttcttggttcttccatcgggagggccatatagtagcctatctgaatctctgcctatatttgtatgtggtctgaagatcaccagctgatttctcttcctattcctatgattgaaggactaattgtatcagattcccagatccaaatggttgacttcttgaggatattttgagcagcagcttctggttttgtaggaaccataaaaagggctttgtaaaattcccttcagtgttggctacagtgggtgatggcaggagtgggagagaggctaagatccagatagcatctgactggcaaagcatcatcccttgatttctttatccacctttattcaattctgaacgctgaaaacaggacaatagtgtgtgatgtcagttgtactgagctttctaaatattccttttagttttctctgagtatataggatttatatacctaagtcttgtctgtttatccaactattcatctacccatctgtcaacaagagtttcaggtattcattctgtgccacatgctgtgccacatgttgaggatacagtaataagcagaaaataaatggtccttccctctcgagcttgccatctaacagaggggtcaggcactctgctgaggatacagtagtaaacaaaaacatggtcctcctttcttcagcttcccatctagtagaggggtcaagtcttaaacacatttgcaaaccgcagttgttgctgagaaaaaaggtggaatacaattctgtcatagcacctaacaaaagaaatccaatctggtgaagggagaagggggtcaggaaaggaagaaatgtaagaatggaggtctaaaggaatcaattaggagaaaagcatgggtatagccagtgatctagatgaggagttggaaaacatttctgtcaaagaccagagagtaaatattttaggctttgtgggctaggtggtctctgtggcaactactcaactctaccattgtagtacaaaagcaaccataggaaatgcatgaacaaataagcatggttgtgttctaataaagctttattctaataaagacagagtgcactggatttggcctatgggcctcccatcccacgctccttctaccacattccttctaccacacttccaccccacattccttctaccacaggacctttgaccatgccattgctctgtctagcaatagcacagtcaaaggtcctgtggtagaaggagtgtgacaaagtttaagtactgtgagaagattatggtgtcacggagctcacagagaaaggggaagtgagatgagagagcctggggaaggtcagaaggacaagacctgtatgtgaagtcaggatggggactttgatctttagcttataaacaatcagaagcaaaagaattgttttaacccagggatgagtggtacaacgtgtttagatttgccttgaaaaggtctccctggctcctatgaaaaaatagactacagaatgacacggatggatatgaggattatttaggagttgtggatcttattcaggtaagagatgatgatgacttggacaaggatggaggtagtggatatagaggaaaatagatggattctagatatatcgaagatgtagactcatcaaaacttggtgttgaactcgatgtgggaggtgagagagaggaacgtgtcaagattaatctatgttacatctctcctgaatgtatccttgctattaaggggaattgaagttttatttcattttcagccccatataattaggatatcaactcatatgattggtaaggtgaaaagtaaatcatctgaacagagatgaatcacaggttaatggatcacgacagctcccccaccctcactggacaacattctcttggcagcttctacacacacctctactgggcataccaagtcatataactattatctgtgttccctatttcatgggctttttgagagtagaaatgccatttcttatgctactaatggttattattttggttagtggaatcttgtgctcacttaacatctgtctattctacaggtgagtgtagatttgagatgtgtttgatgtctggtggggtgggcagttctttccacctagttaagagcatctcactaaaagtcaaccggtgctgagtaactaaacatcatggaacccttttcaaaattatgtaggaagcaacccagagaattatggaaatggtgatgcactgagcataggggctttgcccatccttggccctttgctatttccttctactacctcacatgcagcttttcaatctttgtgatagtccgccctatggctcttccattgactttcctagatccactcccaaccattaatacataaaccagacctcaggttcttgccgtaaacttctactttgaatgtagagatcctatcacaatccagctgagtagatattgatggggtcttctaatccatcagctccttcacacattctgagttccatcccaggatccaggtgatttccagaatgctctgcacttggaccacatttacacagccccatttatagcccactgttttgatgttataccctgagctttaactgatggcttttctataggtcctcctatatgtaagtcttggctcaaagttctggttcttccattaacttgctgagtgatcctaggcaatgagtttcacctctgtgggccgcagtttccctattcatggcaaagtctccaatcacattgtatacaaaatgcagtgaacatttatatccccaggccaggctcctctgttgagctccaggccccagagtccactgccaacctggcatctcttccatgactcaataacacctcaaatcgattggcctagatgtaaatgtccccctcttctgcttcaaatctggccccttcctgtgctatctcatttggcatcatcaccacctacctagagtgagtatgagcagaaaggaagagcttcagggctaaggccggggacacttcaatgattagaggttgggagcaagtacagaaccagtaaagaagaatgagaagaaatggctggggaggaaggcaaaacacaaggagagcaaaagtcaagcaaagaaaatgtttccagaaggaggggctgcgtgataggtccatcatgtgaaactaggttcaagccctgggcttggtttctcggtagctatgtgaccttgagcaagttacttaagttctctgagcctcagtttccataacatgcctcatagcattgttgagaatattaaatgaaatgaggcatagaaagtgctttgtccagcaattactcacaaaatgttagctagtagaattattatctatgttttcaactcatcaagtctgtagctttgagcagagggggggaaattggtctctaagctcagtttattctgctacctagcaactatatatttacatcgtcaacatcacttctttatccctgattactttaacaagcactttttaagtgctctgttataattcaagaccacctgtgaggtgtagagaacaattctattttcttctcaagatgtagtggcctaggataaattgtcaaaaagcaacttcagccttgtaactttactgaggtctctttgaaagtgtattgaggaatgcttgggccagctgacaatgacagtgaaggtctgtaactgataaaatgcactctgcttatctacaatagaaagctggatctatacaactcaaagagcatatgaagctgggttccaaaatcacacaaggacagctgacactgggatcactccaattcccaagcaggttacccttcctggaaagtgaatttaaatgggacacaaatgtgaagtcctttccaaggaggctccagctaccattccagcttcgtctctggccatacattcttgacacagagtatcttggacttcaaacccacttctctgagtccaccagacctcacacctcatatttccaagcttttgccccttccacctgggtcaatctgttctcttgcactattttcaaatcaaaatccatctccttacatcgtattttccaaatcacttagccagaattaatcacttgctgggtgtctgatcagtgtttctgggacactatacacaccttttctctatcatttatcacatttattgaaactaatccacttacaactctcctcttagaggacagtaatatcattggaggcagagaccatgtcttatttatctttacaatccctaaaatgcttggcatagagtcggcattcattgaatatttaaaggaacacctcagctactcccataaccaggagatgaaaagtataattcaatttgagaaggttctatttatgcagaaatcagattaggagtctacagaaaatattacatagaagacaaaccattgttgactgtacttcattcctttgaagggtaccgtgggacaaaactagaacggtcgtgtccctaattaaaggccacgggcccaattctagctggttctacttgtgactcattgagtgatcttgggaaaactctctgcaactcaaatgttcatttttaagatgagaagtttggatcaataacatctaaggtaatttttagttttagtttgattatgtataactattatatcttttttgagtctaatattcttctctaaaacttgtcttaatttaactccttagtgtttgtgatggaaaattggtcaactttctcaaggctgcctaaatttccattttgtaactgctaaggaataaacaattccattcaactttgggttgccaggaacttaataagtgtgtcctttaatctgtcagctaagtggatgattgcaaaatattcaataattcctgtaagatattcaataaaactggagggggcaagcttgtaacattcaattcttctcccagattcaatttaatcttggagcaacctgaaaatataattgttcctgcaaacaggatttttgcatctttgagttctttttcacaatgctctgttgagctctcgatttcagtgtgtgactcatcattgcttttccttgtaaatttccactccttccatcctgactcttagattgttcactgttcagacaaaaggagacaaaatcaaagatacggttgagattcccagattcggggaccctcataactattaatgggctttagcacccttcaggtccagtactcctatggcaataacctcttagttcatctacccagggaggtgagctagagccttcctctcccagagaggccataattctactatcatgaaagacagctttgcaaataaagaagaagggcttgagtctgacagtcctgggcattactttgagctagtgattctctgaatcacctggaaggcttgttaaaaactgattgcttggccctaaccctagagttttgggttcagtaggtctgaggtagggcctgagaatttgcttgtaacaagttcccaggagatgctgatgctgctgttctggagatcatgcttcaagaaccactgctttgagcagatgactcagtgtctgtggccttaagtttccttgtctatgaaatgggaataataacatctacagaaggcagcatggaggagtagtcttggactaagggcctcggggtgtcaggctgacctaggtttgagttccagctctgccatttaaagctacaaagccttaggcaaattccttactattttaaagcctgtttcctcacctttaaattatcaggtataatcataacacttacttaattttcccaccataccaatgagataagaatgcttatacaatataaaacactcagcacgtaaatgggcatataattaatgctctgtatataataactaggatcataaatattaacaatgtagtaattcctacatttcaaggccccagactaggaggattaagtgattggctgacacaaccagaaataaaaaaaaaaaaaatagccctgtaggcttggcaagcagggtcaaacctaacaagaaacagaacagacaaaatgtaaaatctttgatttgggccccaaaagtcatcttcatctgggctgactgaggcagccctagctggaagccatgatttctacattaggcagtcacgtgatgaatatttagaggttaattaaaacatgagtgatatattttaaacccaggtttaggatcagagtgagggtgatggtagctctctgaactcccagtgactcagcccaatgtagagggtcatggttgtcttggaaaccacacattccgtgggcatggaccaaatggagacagaagggtcaaaagagattttgagcagactgaaaaacagaaatttattccgaggagggctgatggctgatgcagtgactgtttagcctgagggaaggacctgggcacagaggtagctgcagtcaaatagctggggagggtgtgggtgctgcaggaagagaagcactgattccattaccctgtgtgacaccagagggcagacaaaggccagcacgtggttgctgactaatacatggttgtgtacaaaagcaggaatgaatgaagttacagaggacagattttggcttaattgaagagagaatacattatgagaaaagatggaaccaggtctgggcttggaactagatctgagtgtgaattccagctccatcattcattcattcatatattcaaacaagtactcaatgagtatctgatgggccagagagttgggcaactgtcattatgtactgatcaacaacaatgaggggtgggggatttaggatgcagtgtttaatacagctcttagcttggggtcatcaattatgccatttatgaaatcaagataatgattcctaactggttgcattgttttgaggatcagagacaatatgtgaacagcacctagcaaaatgactgacccagagagagtcccaagcaaatgtagcaatccttgacatcacacaccatcaagtcaagagtttttgccagagaagatcagggtcaggccagttttcccagagacccatttcccagccagctggccattttcctgaaagggttaaggaatctttacaaagagtttaccaccaccccagccagcctctattgttttaaaagccatgatccgtcttccctatttgaattgctttagttatataacatgttcctaaaataatctggctaaaattttgcctggtacttccttctgcctgcctcatctctactgaaccatcccaagggagtaccaagcctgaacattctctgaactgcccacaaagaaacccttttatgaggtctgtgtggtaaagaacaggaagaatatcaggtttcagggtccaccctcctctttggcagaaaatacctcttaaggtgactgtgtgctggctgcctggtatattttggtcatgttgggaggtacaaagtcagggaaagggtcctgtggctcttcgtgtaggcttccattgcacaaagtcctgtaacaaaggttctctttcttgaaccatttgtctccactgccaggctgcaagctctctgttaggcaggggccattctttgctcctctctctctataactacccagggattggtctagctttgggatgcgtaaggatgggactactggtctgcagtcccactttcctaagagggtcctagtaggatgattccggcagaacctgtctgtgcgtacatccacttggcagctgccttcctgaggcaggagtttcagggaatagaggaaccagtaagaagcactgttctcccagccagaaagtctatttcaccttgatttcctgtctctccttcactcgccttcatggtagagagaccgctaaaggtcaaaggaaagacaaagttgcttggttttgaaagtagaatatctgctctggggtccagggcccattatctatttgtcatatgacttcaagaagatcttttaatatctgagagcatcagtttcctcaactgcaaaatgaattcgataataatcatatggactatacagggttactgagagaatgactaagactccatatttgagcatgcttatcatagtacctggcaccttgtgggaatctgctaggctccatgccagtacctggccccaggcctctgttcagaaaacagctgtggcagcagcttctgcccacatggtagaaaagccagctgacctatcagtaaggaagtgaagttctccctttctcccggctgtcagtgaccttcctctgtgagactggtgaatgttgggctaccatccacagtagaggagaaggaacactgatttaggagtcagagagccttatttgcttctaattctatccctactctttcttcattgtgtgactttgggcttatttacttcagttctctgaagctcaattttctcattcacaaaataggaataatatctaatgatagggttccttgggagcttcagagtggaatttatataaagcataagttttagcacatagtaggtgcccaataaaagttatcttcttctttgggcattttctactagaaatcccagagccaaagtggaatttaaaattatcagagcgcatattttagattacattttaatgtaatatagttatatttcaatatatcctggtcctgaccttcacattttcctgatactgattatttttctcactattttttaaattgtaggttcttttattggatatatccccaaattctttgcagaatgagatggatagactctaactgaaatcaggagagatgtattctcattacgactctgcaatatatgtatgatttgggccatgaaagctctctgaacctcagtttcctcatctgtagaatgggaataattaaaaacctactagctaccttattcctacaggaataaggaactattgctgcagtggagcgttttgcagaaagacttcgtaaactatgaaaggcttacaagtagaaccatgtattatttgtgatataatacctcattttattcatctttgaaactacctctctccccagaccgtgccacatggcttacagcacaggggtaggcatgtactgagaaaaagtccattaaatcccagctccaaggtgacacttagcagagagctagatggcccagtgtctgtctgatgacccttagagaaggactgcctttaccttccagacatggaataattcaatagagggaaagcataaaaatcaggacggagttaactcatggtacccagtaggcaagttaatctgtcaaatgccattatgggaagagcagactaccaagtccccatatcacaggaattcaaaaggaatttattttgaagcatttttgtttggactgaaaatgaacaagaagatgacatgtgaacaaaagagataaagaagaagatttaagcaccagaagaaagacccagaaaatgatcccagtgagcaaaagatcgcagagaaaaataacaagtacacagggcagtaagatcaaaatcagattacttaataaaagctagcatttctctaaatggaaaacaatgcacgttgtttgtccttgaaatgtgacacgtactcctttttcaagaataccaaggcactccaaagcaatggcccatatctgacaaagccccatcaccctagagccctggaggtcattgttcctatacaatattagaaggtttgattgaatagatgtcacagaacttagcagtcacttgaaatagaaaaatcaaacaccgcatgttctcactcataggtggaaattgaatagtgagaacacatggacacaggaagggaaacatcacacaccggggcctgttgtggggtgggggatgggggagggatagcatttggagatacacctaatgttaaatgacgagttactgggtgcagcacaccaacatggtacatgtatacatatgtaactaacctgcacgttgtgcacatgtaccctaaaacttaaagcataataaaaaaaagaaaaaagaaaaccccagaaaataaacctatgcagggacaggtagaatttgaattaggctagggcctacctggtcaataatgaaataattgctcaaggcacgttcttctgtaatcttttgcaatgtaacaactattctgtgccctacctctcaatgctgcctcaacatttgtacataatctcagggcctcctaaagacaccgattcagaggccagacagtcacttccctaatgccacaaaaatagattcaattctacatacatcagggtgatttcagaagcaatttctcatctccagtgtaagcattacttacatttttccccctcaaatctcatcccagtggttccacagggcattttaaaggtacctgatgcattctagggcagtcaaaagatcctgagagtgtttttgtagctgtagcctgaggacgtcagatgcatagagagtcctaacgtattcagtgattcagactaatgcagaattttctaataattgagtataataagtcaatcattatttaaatattttagaaagcaatattgttatgatgaatgcatatatacagtcatatatgtatatttgtgtatatatgactgtgtaggtttatacctctctctgtatatttacgtgtctgtgtaaatataaaacacatatgcacacacatacatacacaccttaatcatttgaaaagtttgtccctggcctttaaaacatctaattagatttcactggatatttctcctcttcctttatggcaagttaaactatttcagtcttgggtgttttcatcttaagggtctaagttttggcccatagcgaacagtgacaatgttatcctttgaaacataagaaatcagtattacccaggtttgcatttgagatcagaaagattgagaaccaatatctaaaatttcagggtcacaatgattgtcaagaagttttggccataatcattttgcttttaagagtcctcccagggtacttttacaaatggaaaaaagtgcacaagaggctggactggacagaaaaggatgaattggtattacttgaccagtattttcaatcagatgaacttgcaaatgaacttctctgccccagagccgaaagcaggggatccagtgacaacttagcatagccagagactcagtgagctcctgatgagcctttctctttttttctattattattaattgacactaattatatacatatttatggggtatagtgtgatacatgtatataatgtataataatcagggtaattaatatattaatcacctctaaatttatcattcctttgtgttagaaacattcaaaatccactgctttagctatttgaaaatatacaataaactgttattaattatagtcaccctacagtacaatagaacattagaacttattcctcctagctacctgtaattttgcaacagaggttggtttacagatgcaaaattatagctaggatgttcctttcttttaaggaaaaatcaagcccattttcttgtcaaccctggtctatgtcaacaaccaatttccctgcttctaggaaatgtatgagtctcagtgatttatctggattgaaaatgggaaaaaaaggactggcttcatggttaggcaaaccgcaaatttgctctgatccctaagaaaaacagatgttaaatatttgctcataatcagtatgtgccattagactttgtctttaaaagccattatctaaccttaagaagaactcaaacttaccatcactggtaatgtgcaaagcggtatgatatgtccattaataggatgtaaagggaagtacgtcatatcagctatgtcatatttttgccaaaatgtgtaacctgaatgttatcatgatgaaaaaaattagacaaatctggattgtggaacactctgcaggacgacagccctagactttaaaaaaatgtcaaggctgggtgtggtggctcacgcctgtaatcccagcactttgggaggccgaggcgggcggattacgaggtcaggagatcgagaccatcctggcaaacacggtgaaaccccgtctcgactaaaaatacaaaaaattagccacgcgtggtggtgggcacctgtattcccagctacttgggaggctgaggcaggagaatggggtgaacccaggaggcggagcttgcagtgagcagagatcgcaccactgcactccctcctgggtgatagagtgagactccatcaaaaaaaaaaaaaaaaaaaaaaaaagtcagtatcctgaaagaaaaaataaagttgagagggctgttctagatcaaagaggataaagacagctgaaaaccaaatacaatgtgagcgctctgattggatcctggattaaaataacaaacaaataagcaatagagaacatttggaggacattgaggcaatttgactatgaactggtatattagatcactgaagtaaggttatactttattgtggttatgttgaagaggtatcctagttcttaggaaatacatgctgaattctctggaggtaaagtgtcatgatgtctgcaacttacttctaaatgattcagaaaattttgaaaaaaaaaacatggataaggggagaaagagagagagggtgagtacagccaagtgcaaaagtgcaaatgttgcaaaatggtagcagttggtgaatctaggtaaagggtatatgagtattcattttgctgtcttctcaacatttttgtaggtttaaactaatctctcttcccaaagacagtacatcagtatctaagcatagctattgcctctgtccaagtgctgtattctaaatctgggtgcctatgagaactctctgaatgacttacaaaatccatatccctcagttgggccccacctctcatcccccaggagattttgattcaggagataaggtgtggggtccagatatggatgtgttgaaaacctccccaggtaggttctgtgctacactggagcttaggaatcatgggcctgagttactctcagatctggatccattaaaaacaagctgtgtggctctgagatggctggccaaacacacttagcattgcatagcttacctataaaatgggaacaataatactaaggatcttacaggactatggtgaggatgagagacagtgtctacattatagaaggggataaattttttctttctttctttatcctctcatagatccccatcatcccaaactgatcatctcttgagtgattttttacaaaatggaggttcttccatttgtagcttacatggtatgtggaggacatctgtgttatgcacagattctttgagacttcttgcattacccaatttggggaagaggctgggaaatctagtctgttaactgtctgatagaatggctgtaagaacagaagcaagtctgtccacaaggaagccttagatgttggcagtcttggagttcttcttaggataagggttaaccctgatatcttaaccacccaaatcttgggatcctttattaacactgcacaaggactcaggtgcccttgaccaatgctacttggaacactggctgtggtggaactggcaaatgtttgagggatgaggcttccaatctaaatatgtaactcatcagccattgtattttagataagttgcttctctgagcctcagtttcctaaccactcagagtggagacagtcataatctgtgactcacctaccttatgtggtgtatatgaaacacagatttgaaaatcttaagccactcaattcagtgtggcatatttttctccttaaggacataaccatcctcctcctctttcttttttactgctattatttttaacctgtctctatttatgtccacaagcagttaggatgacttgctcccatttccatctgatttggggaagattttttaaatattccttttcatcttaggatgaactgccccaagtctttgtcagggagaaccttcatcccagtccatatcaggcaagcatccataccctatgcctggcagcacctgatcaatgtgtggggttcacagcagaagtactagggctgagctggaccacggatgtccccttcccctttgttggctctacttactgaatccgttgacgtcctgagaactagaagagaagccttcatcattgcggctggcgctgagcttggtggtgggtttgtcggcagaggccacaggccccatctccctctgggctccactctgggtctccttctgcttcttggccagcttcctttgggacatgtgcaaggggaaaaaaccacagtcagatggtgccagttgcattaaagcattgggtagattgttcttccccaatgctcatcctcaacccccaaatctggttcattctccagaaaaagaatcaaggcagaacaaaccatgaatggtttccatttactcagaaatatgagactcacgctgctgcctcacccccgacaatgcatgtgttctatgtttgagcctaaaatgggaaatcaatgagacttgtacaatgcttcccccactctcctttcagaggaaatcaacaagatttgtattcctttccctaagtctcctttcagagggaggaagtggctagactggcctttctgtttctgtggctctgaatgagattaaaaatggaggcttgtctttctcaggaactgagctcatcaaaaacctaccaaataatagtagagtgaagcaggggctggtggttggaaatggatgagtgtgcgggttagtttcacagctcaaaagaaggaaatttagagctgaattgatgcaaccttattcccatgggaataaaagaccctcagaaccagacggatattatcataatataactattatgataataatagtgtagagcagtgcttctcaaactttggtgtaaatttgaatcacctgaagagtcacaaaaaaatacacacacacacacacacacagaggctcaggatcattgaagtaggacaggacctagaattctacatggccatcaagttccccaagttattctgacaccagccactggaggttaaaaatatcagctttggtgtcagacagactcaggttcatagcttacctctgctgcctgccaactagctgcaagacccagggcaaatttcttactctaaatcctgaactattcttctgtatactgtggcagatgacaggaccaaccttatagggttgtgaggattaaatgagacaatgcataaaatacacagagcacagtgcctcgcacatagtggacactagacacctagcagttgctattcttgttttttctactattgccagtggatccaactatattctaatgttggaattccctccccaacagccccactgtgggatcccatctctccctgaattctttcaaatgatgtggactttgacctcactgaggaactaaaaagttaaaaagttcttttctatggatttaaaatctatgtcctttaaattttaactggataggtctcagatatatcattagagatacaaaaatatgactaactcctcttgcatataagagttattcaaatatttcgaaaaagcgaacatggtccctctttttccaacatatatgcatcgaaatatagctgttatagtcttatcacatgaaaggctataggttaaacatcagatatcttgagagtaaatttctccaagtctcttactccatccttcacaacagtaggcttcaaattcaattttggtcattcctgtcctgtctcaacacacaaaaagggctgtcccagagaggtcaaatccagtgcaatacagggaataattttccaaggttgagccccactgatcatgaaacagatagtttcaagaggtaacaatctccctgccagaggaagtataaaaggaaaggataaacctcaacttaggctgggaacagtggctcatgcctgtaatcccagcacgctgggaggctgagctgggcagatcacttgagcccaggaattgagaccagcttgggcaacatggtgaaaccccatctctacaaaaattagccaggtgtggtggtgcacacctgtgctactcagcaggctgaggtgggaagatcacttgagagcccaagaggtggaggctgcagtgagccgagatcacgcctctgcactccagtctgggtgacagagtgagaccccatcaaacaaacaaacaaacaaaaaacagaaaagaaaagaaagacccaaacctcagcttagaagtgttttagaggagttcacataggacaaattccagtttgatagcatcctccttgaaacatgaatctcatgctctaggtgtagacttcacagaagaatgacagagggcatactcaaatgaggacaatttgaggaaggtttatttataaaaggtctgctgataaaggtgacaaatgtatagagacccataatatactagtgcctcagtaggagagctgtttattacctatgggaccagaggaacaaatagaggaagcagtaaccagagccccaaagaagagagctgtgaaaaggaggtaccctgaacagaagcagcggctttctcttgaaaggcccagccagtcatagacaacctgacagggagagaaccagaggcaaaaaaaaaaaaaaaaaaaaaaaatgccctgactacaccttatgcccttcctctggtcgcctgtggcagttctcactagctgaacccaacaagtcagaagtggcaagtgatctttttgacagacttcatacagaatgcactctggaagcagagagcacagtagagaaaggtggaaaggggaactggatccaggaatcccaaccaagaagagaaaagttgcgtgtgtgtgtgtgtgtgtgtgtgtgtgtatgtatgtgtggacagtgtcttattctgttgcctacactggagtgcagtggtgcgatttcagctcactgcagcctctgcctcccaggctcaagtaattctcatgcctcagcctccagagtagctgggactacaggtgtctgccaccgcatccagctaagtttttgtaatttagtagagacagcgttttaccatattgcccagggtggtcttgaactcctgagctcaggcaatccgcctgcattggcctcccaaagtgctaggattacaggtgggagccaccgtgcccagccgagaaagtttctttatacgtctcgttttggccataatttggagaaacatgtagcctaaaatggaattctttattcactaatttttttaagttggctcggggaaagaaaggcactcaggaagaggaatgcatcttttcattataatgctttggccacaggcacactgttctaccagtaaaatgattccaggcagatatacaacaagaaatgaagcattggattggtcagacaattagacaggggcgggggaatgccaacgaaagaaaaatgagcaattctgcttctgatgacattttgaaattttattcttcatttattatcaaaaaggagtgtgtttaaaaatgtatatgtgaccttcttaatcataaatttgaaaagaaatatagcagattctttgcttctatctgagctctgctcacattgccccagcaggaaataaaaggaaatctgataagagagttaacttaaaactataaatgagtatgtttcggaggctttgatatttccttaggggcagaactctcaaccaatctcattccattcagggtaaagtaatatggaaagggttgtcttaggcacagatcattggttttcaaaggaatcataataataatgaaagccttgctgcttttatgaaaaatggtactttatagaaatgtttgggtagctctgaacacctgtattaaaaaaagaaaaactaagcatccccaaaacacatatttaaaaattggaaagctaactgaattgtaaaaatatcagatatattacatccttagtatttaaagctgatggctgactctgtattttcatggtgataataatgttatataatcattttaatgtatggatagatgttatggcaattggcaaagacagctacaaggtggaaatggagggggtatttgtggaaggaaataaaacacaaaaccacagtttggggatctatatctattctttcagaattctgaatttaagtgttaaaaagacctctcagtaacacagaaaaattgacattcatctccatagccaaataatttaatttactacctcattatttttctctctcaacgaaagagaaacccaaatctgtgaatagggcaaacaagacccttaaactaaggactgggcttcaactcagtcttattctctgcacataaccttatcctcccctttcagaaaacatcaactacctcctcccaccacactatttctcaatactccatattccttgatgtgtccctcttcttctccactggtcacctcctctttgtcctccaaggctcaatgtaagtgtcacatctcctctgaggcttctccctgctcttctacatagaattataattttctcctcttgcttgactcatccattgaacatgtacatgtataagtctctgctaaatactagaagatcatgtcttcttgaccttaatccacatggaacatgaagactaatggcaaagacgggcattaaacagataaatacagagacaaaaatcacaaagacgatgaacaccaagaagaaatacctgttgctatgtaagagctagaacctggtttgaaccctggcagcagatcagggagggttttggtgccatgttagctacgtacttgttgagtcaaattgcagtgattcaactctttcacctactacgacaagaacttcttgggaaagggcttttgactctttgcacctactccaatttcttgctgagtgtctggcacatggctcaataaacttgttgcacgaatttatacttaaaagtctgcaatttggagtctagaaaagatagtcctcttactctgaacacaaattacaaccactttaaaagtagatacgtgcaaagaaagagaaggaaacgcctgcataaaattagctggtgacctggaatattcgtaactagaaatattttgggcggtaacttagcatttccttcttggaatgtttgcagaattaacaaaatattcatgggagtcagagatttcccccgcagagcccacaaaatagctgcagctatagcatgttgaagaagaaaaaaaaaatctcatgcaatagtcatatgactcatgggatgatcatataattcatggaattctcagagccttcaaaactcaagtacttatgactttctgaactgaggatttttttctgtagttgctttgagatttttgccaactgggtcacacaatttcgccagcagggggtaccaaaagctgataaaaagagagtatgcataagtctgtttattcctttgcaggaacatttccaaagctgaagactgttttaagacacagcaatccaaagtttactgcttctgacaggtgaggacgaggtgacgcggccatagctcttggcattttccttctaacggatcactttgagctctctctgaccttcgcttgttagctgagggaggggtaggtggcaggggatgggcccaggatggaccatgagtcctgtgatttgttctgagtgccactctttacaagggatactggcaggtagaatggctcacgggagaggaatgaagggctgttaaaagtgtggaaatcatgctacgagaggaggagtgcgtgaaacatccagggacatttctcacggagagggaatacaaagtaacgttctcttcatgcatctgatggttgggtctctatggtcccaggggcagaatgaggaccaggttggcttgatacaacgaaggaatttctttttttttttttattatacttttagttttagggtacatgtgcacaacgtgcaggtttgttacatatgtatacatgtgccatgttggtctgtggtggggtggggggaggggggagggatagcattaggagatatacctaatgttaaatgacgagttaatgggtgcagcacaccaacatggcacaacgaaggaatttctagcaaagtagaactgcttaggtctcttttggaagcacctaacgcctgaattcccctccccaatttttctggtttagcaaccttctcttcaccttttaaggcccaactcaaatgtcccctactcttagaagtctttgcctccttcccaaagttagaagttccctcctctttgctcattaatttgttggacaaatagttaatgagcaagtacgttgaatctgtggctgttagaaggaaggagatgatgatatgaaaaacaagacaggaatcctgccctgtttggcttttgcaagtactcagctccctgctattggagaagttcaagtagagactgggaaaccacttagaaaagaggtggtggaggatcccaggatttggactctgcaaaacccttgactctcttctgggctaggaacaggaccatccagccaactggtgggggcaggagtctacagggttccacctagagtttttccctgaatgtgggagccatgcccactctcctggggagacactgatcaggcactcttcctcttccccatagggctcctcctctgggccatcctccattgcaatctccagataaactttcctggaaaccatgaagattgaaatcctggagtcagagatctcagccataggaagtggaccaaaaaaaaaattcacaagtgaggccctgcttctactaaaagctggcactgtcctctttgaatccaggatgctctgctggcatgactagatctcagcttaaagttacacatcgcaactgtaagggaactatagcatcttctcatttcatagacaagacactgaggcctggacagagtagtcccttagctaagatgcacagcatgtaggatgcaagccctgctttctgcctgccagttcaggaatgtggacacctgctccacattcctccatgcttcttctagggatttgcccttccagattagaagggcaaattcagtctgtggtacacatgattccagtgtcttacaaatgcagcaaaactttattcatctatgcccccactgactcagaattactgtaattgaggcaaaggctgagctacatcacataagaatcaatagtgtagcagggggaggagccaagatggccgaataggaacagctctggtctacagctcccagcgtgagcgacgcagaagacggtgatttctgcatttccatctgaggtaccgggttcatctcactagggagtgccagacagtgggcgcaggtcagtgggtgcgcgcaccatgcgcgagccgaagcagggcgaggcattgcctcacttgggaagcgcaaggggtcagggagttccctttccgagtcaaagaaaggggtgacggacggcacctggaaaatcgggtcactcccacccgaatactgcgcatttccgacgggcttaaaaaacggcgaaccacgagattatatcccacacctggcttggagggtcctacgcccacggagtctcgctgattgctagcacagcagtctgagatcaaactgcaaggtggcagcgaggctgggggaggggcacccgccattgcccaggcttgcttagataaacaaagcagcccggaagctcgaactgggtgaactgggcggagcccaccacagcacaaggaggcctgcctgcctctgtaggctccacctctgggggcagggcacagacaaacaaaaagacagcagtaacctctgcagacttaaatgtccctgtctgacagctttgaagagagcagtggttctgccagcacgcagctggagatctgagaacctgcagactgcctcctcaagtgggtccctgacccctgacccccgagcagcctaactgggaggcaccccccagcaggggcacactgacacctcacaaggcagggtattccaacagacctgcagctgagggtcctatctgttagaaggaaaactaacaaacagaaaggacatccacaccgaaaacccatctgtacatcaccatcatcaaagaccaaaagtagataaaaccacaaagatggggaaaaaacagaacagaaaaactggaaattctaaaacgcagagcgcctctcctcctccaaaggaacacagttcgtcaccagcaacggaacaaagctggatggagaatgactttgacgagctgagagaagaaggcttcagacgatcaaattactctgagctacaggaggacattcaaaccaaaggcaaagaagttgaaaactttgaaaaaaatttagaagaatgtataactagaataaccaatacagagaagtgcttaaaggagctgatggagctgaaaaccaaggctcgagaactacgtgaagaatgcagaagcctcaggagccgatgcgatcaactggaagaaagggtatcagcaatggaagatgaaatgaatgaaatgaagcgagaagggaagtttagagaaaaaagaataaaaagaaatgagcaaagcctccaagaaatatgggactatgtgaaaagaccaaatctacgtctgattggtgtacctgaaagtgatggggagaatggaaccaagttggaaaacactctgcagggtattatccaggagaacttccccaatctagcaaggcaggccaacgttcagattcaggaaatacagagaacgccacaaagatactcctcgagaagagcaactccaagacacataattgtcagattcaccaaagttgaaatgaaggaaaaaatgttaagggcagccagagagaaaggtcgggttaccctcaaagggaagcccatcagactaacagcggatctctcggcagaaaccctacaagccagaagagagtgggggccaatattcaacattcttaaagaaaagaattttcaacccagaatttcatatccagccaaactcagcttcataagtgaaggagaaataaaatactttacagacaagcaaatgctgagagattttgtcaccaccaggcctgccctaaaagagctcctgaaggaagcgctaaacatggaaaggagcaaccggtaccagctgctgcaaaatcatgccaaaatgtaaagaccatcgagactaggaagaaactgcatcaactaacgagcaaaatcaccagctaacgtcataatgacagaatcaaattcacacataacaatattaactttaaatgtaaatggactaaatgctccaattaaaagacacagactggcaagttggataaagagtcaagactcatcagtgtgctgtattcaggaaacccatctcacgtgcagagacacacataggctcaaaataaaaggatggaggaagatctaccaagcaaatggaaaacaaaaaaaaggcaggggttgcaatcctagtctctgataaaaccgactttaaaccaacaaagatcaaaagagacaaagaaggccattacataatggtaaagggatcaattcaacaagaagagctaactatcctaaatatatatgcacccaatacaggagcaccaagattcataaagcaagtcctgagtgacctacaaagagacttagactcccacacattaataatgggagactttaacaccccactgtcaacattagacagatcaatgagacagaaattcaacaaggatacccaggaattgaactcagctctgcaccgagtggacctaatagacatctacagaactctccaccccaaatcaacagaatatacatttttttcagcaccacaccacacctattccaaaattgaccacatacttggaagtaaaggtctccttagcaaatgtaaaagaacacagaaattataacaaactatctctcagaccacagtgcaatcaaactagaactcaggattaagaatctcactcaaaaccgctcaacgacatggaaactgaacaacctgctcctgaatgactactgggtacataacgaaatgaaggcacaaagaaagatgttctttgaaaccaatgagaacaaagacacaacataccagaatctctgggacacatttaaagcagtgtgtagaagtaaatttatagcacttaatgcccacaagagaaagcaggaaagatccaaaattaataccctaacatcacaattaaaagaactagaaaagcaagagcaaacacattcaaaagctagcagaaggcaagaaataactaagatcagagcagaactgaaggaaatagagacacaaaaaacccttcaaaaaattaatgaatccaggagctggttttttgaaaggatctacaaaattgatagactgctagcaagactaataaagaaaaaaagagagaagaatctaatagacacaataaaaaatgataaaggggatatcaccaccaatcccacagaaatgcaaactaccatcagagaatactacaaacacctctacgcaaatgaactagaaaatctagaagaaatggataaattccttgacacatacactctcccaagactaaaccaggaagaagttgaatctctgaatagaccaataacaggatctgaaattgtggcaataatcaatagcttaccaaccaaaaagagtccaggaccagatagattcacagctgaattctaccagaggtacaaggaggaactggtaccattccttctgaaactattccaatcaatagaaaaagagggaatcctccataactcattttatgaggccagcatcattctgataccaaagcctggcagagacacaacaaaaaaagagaattttagaccaatatccttgatgaacattgatgcaaaaatcctcaataaaatactggcaaaacgaatccagcagcacatcaaaaagcttatccaccatgatcaagtgggcttcctccctgggatgcaaggctggttcaatatacgcaaatcaataaatgtaatccagcatataaacagagccaaagacaaaaaccacatgattatttcaatagatgcagaaaaagcctttgacaaaattcaacaacccttcatgctaaaaactctcaataaattgggtattaatgggacgtatttcaaaataataagagctatctatgacaaacccacagccaatatcatactgaatgggcaaaaactggaagcattctctttgaaaactggcacaagacagggatgccctctctcaccactcctattcaacacagtgttggaagttctggccagggcaatgaggcaggagaaggaaataaagggtattcaattaggaaaagaggaagtcaaattgtccctgtttgcagatgacatgattgtatatctagaaaaccccatcgtctcagcccaaaatctccttaagctgataagcaacttcagcaaagtctcaggatacaaaatcaatgtacaaaaatcataagcattcttatacaccaacagacaaacagagagccaaatcatgagtgaactcccattcacaattgcctcaaagagaataaaatacctaggaatccaacttacaagggatgtgaaggacctcttcaaggagaactacaaaccactgctcaaggaaataaaagaggatacaaacaaatggaagaacattccatgctcatgggtaggaagaatcaatatcgtgaaaatggccatactgcccaaggtaatttacagattcaatgccatccccatcaagttaccaatgactttcttcatagaattggaaaaaactactttaaaattcatatggaaccaaagaagagcccacatcgccaagtcaatcctaacccaaaagaacaaagctggaggcatcacactacctgacttcaaactatactacaaggctacagtaaccaaaacagcatggtactggtaccaaaacagagatatagatcaatggaacagaacagagccctcagaaataacgccgcatatctacaactgtctgatctttgacaaacctgagaaaaacaagcaatggggaaaggattccctctctaataaatggtgctgggtaaactggctagccatatgtagaaagctgaaactggatcccttccttacaccttatacaaaaatcagttcaagatggattaaagacttaaacgttagacctaaaaccataaaaaccctagaaggaaacctaggcattaccattcaggacataggcatgggcaaggacttcatgtctaaaacaccaaaagcaatggcaacaaaagacaaaattgacaaatgggatctaattaaactaaagagcttctgcacagcaaaagaaactaccatcagagtgaacgggcaacctacaaaatgggagaaaattttcgcaacctactcatctgacaaagggctaatatccagaatctacaatgaactcaaacaaatttacaagaaaaaaacaaacaaccccgtcaaaaagtgggcgaaggacatgaacagacacttctcaaaagaagacatttatgcagccaaaaaacacatgaaaaaatgctcaccatcactggccatcagagaaatgcaaatcaaaaccacaatgagataccatctcacaccagttagaatggccatcattaaaaagtcaggaaacaacaggtgctggagaggatgtggagaaataggaacacttttacactgttggtgggactgtaaactagttcaaccattgtggaagtcagtgtggcgattcctcagggatctagaactggaaataccatttgacccagccatcccattactgggtatatacccaaaggactataaatcatgctgctataaagacacatgcacacatatgtttattgcggcgttattcacaatagcaaagacttggaaccaacccaaatgtccaacaatgatagactggattaagaaaatgtggcccatatacaccatggaatactatgcagccataaaaaatgatgagttcatgtcctttgtagggacatggatgaaactggaaaacatcattctcagtaaactatcacaagaaaaaaaaaccaaacaccgcatattctcactcatagatgggaattgaacaatgagatcacatggacacaggaaggggaatatcacactctgggaactgttgtggggtggggggaggggggagggatagcattgggagatatacctaatgctagatgacgagttagtgggtgcagtgcaccagcatggcacatgtatacatatgtaacatgtaactaacctgcacaatgtgcacatgtaccctaaaacttaaagtataaaaaaaaaaaaaagacaaaaaaaaaaaaagagttcaatgtgttgggaagtcacaaagtataagtaccatgctagtgctaggaaaataaagatgacccaattagtcttttttctcaaaaaaaaaaaaaaaaaaaaagaatcaatagtgtaaatagggatatggatgtgtgcagcatttaaaggagaatgcactgttttccctcgtatcaggaggcaggactgcatagcagttaatatactggctttggtgccagacagcctggcatcaaaatctggctccatgtcagactagctgtgcaagctcttgcaagttactgagccctctgcatgccagtttcctcctgcctgtaaaacacggattagagtagtacttcccccgtcagactgttgggaggattgaatggtatgttgctggtaaaccactttgcccagggtatgcacacagtaagcactcaataaatgctctctggtatgatcatattttaaatacaaaaaaatccatgttagtttaaataacctcattatttattaaatatgaatactttgaagtggatgccctggataatgacttttctttaaaaacctccattgatgcagtctagagccatgcttttcagctttggctgagcacatcatttggggagctttaaaaattaccagtgagattctaatttaattggtctggggtgcagcctgggcatctgggcattcagaagctttccaggtgattatagtgtgccactaagcttgagcaccaccgatgcggaacagctgttctccaagtgtggtttccctggaccagcagcatccgcttcacctggggatgtattagcaacgcaagttcaccggccctgccctgacctactgaatcagaaactctaggtgatcaataagccctccaagcaattctactgcatgccaaagtttgagaaccaccgaagtaggtgggcccactcttcagcaggtctgaattagtaaagtttcattcttgaaaatggaacactagaaggtaagagacccgggtgccgggtccagatctccagatatctcattgagttgccgtgaacactccctttcccctctctgtgtattgatttcactatagtgggggagttggcatctaagaatcatggcaacaactgatgcttttaaaatgattgttatggattgaactgtgttccactcacccactctctggccgcaaaagatatgttgaagtcctaatccatagtacctgtcaatgttaccttatttggaaatagggtctttgcagacgtaacgaagttaaaatgaggtcactagggtggctctgattcccagatgactgatgtccttacaaggagagggaaatttggacagaagtgcactggaagaatgccacatgacaacaaaggtggcgatgggagtgatgagccataagccaaggagcacggaggactggtgggcaccaccagctgccaggaagaggcatggcaccattctatttagagtctcagagggagcctgacccctccaacaccttgattttggatttatagcttctaaaattatgagaggacaaattttggttaagtcatctagtttgtgagacattggtacagtagcctgaggaaactaataaaatgaccataattcctaaattgatgttatttgtttaataaacattatagagtacttattgaataccagccactattcaaggcctttataaacagggtattaagttccttaattctgctacaacaccgtgaggccaggagtattattagttccattttacagataaaagaattgaggcagagagagttgaagtaacccatggaaagccacccaggctttcagaggcagagctaggattcaaaccctccagtcaggcttctaaatgttctctaagattccctgttatgtcacgcttaggcaaaaagccatcacatatctccccttgtcctaaagctttctcagctgtctccctttctccccaggcaaacacacactcacacatatgcacatacatgcatagacagctgcggccagaaaactcactcacaaccactcatgtcctgcaggcaatgagcatcctgtctgctcactgcctctgttgggtaccaattctggggcatagctggtgggtcctttccctcctgccccatcaccctcatctagggcttgtgaatcccccagcatggcaaagttacagaagcaacagcagcagcaacagcagcagcaacagacgtcatgacaatttgaaaggccaaaggacttggtcttctacttccattgctttgctatcttgctgtccatatctgtgcctctatctgtctatctctgcttctttattctgcctgtgactacctctctggcctggatgggctctcctaccaatcacactctttccacttaggcaatagtcagaccctgttggaccattctctgcacccagcagtgaaatcagagcagcagaaagcccgaaacacaggtgaggccctcctccctctgggtacatggccatactggcccctgggccctaaagcagagcctaggaatagcactgactttggagccacactgcctagactgaaatcctggctccatgatttattagatgtatagtcttgggcaattgctaaacctccctataactcagttttctcttctgtcaaatagggataattataatgaattctcttagcaatgctttgaggtagatactaacttataattatgaaagtacttaactgggatctgtcacctaccaaataagctctacataagcatttgttacataataggtgataagaaagaaaaaagtgcttcaaagcagagtgtgaccagaattcatggttcagacaatgggagcttccctgaatgaatgctgtctgagctctgaacccctgggttggggagatggcccctctgttcttggtgttgcagaaataccatgggctctggccctggactgacttggctcctaacagtggtgtaatcatgatcaggtctccatttctgtgactctgtgagactcaatttcctcgtctatagaatagaatttaatataccctaatttgcagagttactgtgatgatgagaaatgataaatgatgacagttccctagcatggtctttggcatataaagatatgcaacaaatgctagttcttttttatcctccttccttgccccagcaatccgcatgactttttccttgctttcatttttaattttatgtttgatctgcttcccaagatgagcactctagggaaccaaggtgactaatctttcctccctgtagtttcatcttgctctatccatatcctgctcatacgacccgaaaccaaaccagccagtggggcagatgctcttcccctattcatgcgttgaccttcagtttcacatcattaaaagttgtagaatcttggattctctggctggaaaggccctcccagtcattttcccaccctagctaggagactccttgcagcatccccagccagtgggtatccagcccccgactgctgaattccagcaacccaaactcatcacctctgtgggcagctctttaacagactgcagctccctatatagggccattccttgctgagctgaggctgagctgaactctgtctcctgaaggcctcaccctttagatgctcctcctcggtctgtctgctatatcccaacaaagcctgtatgtggatagatgatgaccatgaattcttcaagctttatcccaagcaaccgcttccaagcagcgtctcctggttgctgaggctttatggctatttccctacagctgagtgaacctccttctccgttccacactcacatgcccacatctcttctcagatctcaaaccaggactccagggtgatctccctctcaccagctcacaactgcctcctctcaccctgaccccatcttagaccttcagttgccaactagaaacatcatctccttcttgctgaatggctaacttacagggctattgccctgctagactataaccacaaggacaacaacctttttggccttgttcactaccaattccccagggccttacatagattttggaacaagcgggtatcctgtaaagacctgttgaattaacatattaagagatgatcacaagtccttcaaatcccattcaaatcatcacttctttcaggaagccttttctgatctcttcgtgatagggtaggccttgcttctgttttgtatcccagtcatttgcctatcttctctcatcacttttcattataatcaaggtacaaaatatacatatttgcgtattgtatttgtatttcctttagcacatagtttagcacttcccacaatgttgtaaaagctttaaacatgtttatggaatgaatgaataaattgagtgacactttccattcctttattgttgcatcgtcccatatttgagcttccccgtgtctacgacttgacccttttcatcaatttctgcaccaaatttctgtatttaagcagggtcctacttactattctacaagttggctttcttctgcaggtagtgcatggcaatgattctcagacttgagtgtgcatcagaatcaccttgttaagcaggcattgttggtctccatcaccagtttctgatttggtaaatcaggggtgagtgcaaaaacttttcatttccgagttcctaggagacgctaggttctatattttgagaactactggtctatggaatgccatcttctgccccagaggggatcacataccatttatcttccaacttttcttcatcagtcacctcaaacattacatccaggccaggcgcagtggctcatgcctgtaatcccagcattttaggaggctgaggcaggtggatcacctgaggacaggagttcgagaccagcctggccaacatggcgaaatcccgtctctactaaaatacaaaaattagcccggtgtggtgacacacgcctgaagtcccagctactggggaggctgaggcaggagaatcacttgaacctgagaggcggggaggttggagtgagccgagatcacaccaatgcactccagcctgggggatagagtgagactctcaaacatacacacacacacacacacacacacacacacacacacacacacacacacagaacattacgtccatcccccactccaccccaaaactgtagatgggcataagaccatctatcctttaatccacaattcccatttttctagaattttatcctaaggaaataataagaaggaaaatatacatgtatcatgtaggtaccactggaaacacagcttcctctatgccaggatttctcaacctcagcactgttggtattttgggccagataattatttgctacgtatgtgttggggagttacctagtgcactgcgggatgcttagtagcatcctccttggtttccaccctctagatgccagtagttccccctactcccaggcatgtcaataaaaatgtctctagacattgcaaaatggttttctttttgggtaggcagaattgcccctactactggcatagttaggtaaatgtaacagtttaacatttagcagatactaccatgtgcttagtattttaaacatagctccgattttcacaacactaacaaggtagtgattatttcttttgttttataggtgaggaattcagggcccagaaaggttaatcctaaactcgtaaaacaggtaaagggaacaggtgggatttgagcctagctcttcagcctgctgagagcatgctctcctcctcacccaacttggctgcctttctttaatagcaaatgatcggttaaagcctcgtaaatgtctaacaatagggaactggttcagtaaattatagtgcatcccctggatggaatattatgcagccattaaaatgatggagggccattaaaaatgaaaaccatgtaacgacatggaaaaatgctaactggattacattaagttaaaaaaactagaaaataaaaatgtgtctacattgtgattacaacgatgaagaagtatatctatgtgcggatggctcatgtgttggattgaggatattaaggataattttcctttcttctttgatatccattattgttatcagagtgtcttcatgatcctaatttctaagtagtagcagagtaatgataagattcaagatgttaggtttgccctaggcccttcttccacctgaattagaatgaagacttctctaaactctgactatagcaaggggttgatttacccttactttccctcctattagcactgttgcatgtatgtttgtgaccccaggcccctctccttgcactgaccagcttctcccaagcacagaaagctggaagcatagaagaaaacaactctgaaggcattggtgtgaatcactctgggagccagggctattaggaacatacagtcttagagtagcagatggcatctgtctgtcacagggtactgagcggtgcactgtctcatgcattatgcatcaagagtggcctagcaccctggcccggctgtgtgggacaagtcttgcaaaagaaacatctgatgaactgatcgggatgtcaaaatgtcattaaggataaattaatggatgtgttactttggctgtaagaggcagtgccagcaagacaacagacagccggtgggctgttctccagcccaagacagacggcgtttgcaatggagattcatggtctttatgcaacgtgaggtgctttgcagggagaagaataaacagaaatgctccagcacttaagcgccataaaatcacaagcatgagattaattaattagtgtacactaggaaggcggctggtctgtctgcgctcctggggaaagctagaatggatggcactgggttagagatgacgggtccctgcaccagcctcctaaagaaaagcaattgaatttaatgtgcaatcataaactgccgctgatggaaagataagtctggtcggtgtttgttttttcagggatactatttctgcctactgcttcaaacactttgtgtctgtgggtcaagtatctgagaggactggggagacctggaaactagttctgcttataacgccatgtgggctatgaagggtgttataatctcaacacatagagcaactctcagggaagcctgactccccctgcgcctttctagatagggggttgtccattcttctgtgataggaggctcaccacttccctttcaacctgacccagtgttagataagcattgttagagagttcttccttagacttccctagcctcttcctccttataacttaacaacaacaaagacaagaaggagaatagctaatgcttactgagtgcttgctgggtgccaggcactgggctctggtcaagttacaatgttatcatgtattatctccattttgcagtgtaggaaaaagaagaccagagggtgtgaaagacatgctgaagatcgcacagctagtatatggtagggccaagatccaaacccggggctgcctgaggccagggcttgacagcttaactatcacatggttctaagtcctgtaactaccattaattggatggagcctggcttttagagcaatacagaatatgacaaggcaagacagatgagaactcacatgtagcacatattgggcactgctaagcacctggcctgggtcagcctaacacatcgttcatgcagtagccttttttgagtaacgaaattatttccccatctgagatatctattttcttatctttttaaaaaagttatatatatatatatttttcaacatataaaaatcggtttcacttctgtgtatttataatgaacaattagaatctgaattttcataaatagtacaatttacagtagcacccaaaaaagaaacattcagatataaatccaccaaaatacacatgggacctacatgacaaaaactataaaatggtgatgaaagaaatcaaagaagatcgaatcaaacaaagagacatacatgttcctaagctggaagactcagtattgttaagaggtcatttctcaccaaattgatctacagattcaatgcaaacccagtcgaaactcagcaggatattaacaagcttgcggatatcaacaagctaaaatgccattgtacatttatttccaaaaaagaacagggaggcaggtcgtgatgggtcatgcctgtaatcccagcactttgggaagctgaggcaggactgtttgaagccaggagttcaagaccagcctgggcaacatagtgacaccctctctacaaaaaaataaaataataaaaataaaacacattaataaaaagaatggggaaaaagcctctaaaccgcacatgtccagaaaatataacatgaaacattgttatgtataaatatcataatcacttaggtacattgtttaaataaagttttttatgtatgtctgctataactaaattggaataaaattctctccaaggtacaaccctttttataggatactataaacaaaaacgttaagagacaaaaatttactcaatgaagtttaagcaggactcaagaggccaatttaaaaaacaatgaacgtgaccccaaccgtatcctctctttaatcttggtcctatttctccaatgtagatgataaatttcataccaattgtgaaacaacgaatgatcttgctcctgttttagggacagtgagtatatttaaagaaatgatacagttggtagagtttttttgttttctgttttttgatttttgagatggagtctcactctgtctcccaggctatgagtacagtggtgcgatcttggctcactgcaacctccgcttcccgggttcaagaagcaattctcctacctcagcctcccgagtagctgaaattacaggcatgcaccatcacacccagctcatttttgtatttttagtagagatggggtttcgccatgttggccagggtggtcttgaactcctgacttcaggtgatccatccgccttggcctcccaaagtgctgggattacaggcatgagctactgcatctggctagttggtagaattttttatttggttggtatattagtccattctcatactgctataagtatactacctgagactgggtaatttataaacaaaagaggtttaattgactcacagttctgcatggctggagaggcttcaggaaacttacaatcatgacagaaagcaaaggggaagcaaggcatatcttacatggtggcaggagagagacagcatgcaagggaaactgccactttttttttttttgagacagagtcttgctctgttacccaagctgtagtgcagcggcatgatctccactcactgcaactcccaggttcaagcgattttcatgcctcagcctcccaagtagctggaaccacaggtgcatgccaccatgcctgactaatttttgtatttttagtagtgatggggtttcatcatgttggtcaggctttctcaaattcctgacctcaagtgatccacccaccctggcctcccaaagtgctgggattacagatgtgagccaccacacctggccaaaactgcgacttttagaaccaccagatctcacaataactccctcactatcatgagaatagcatggagggaaaccacccccaagatccagtcagctcccacccattccctccctcgacacatggggattacaatttgagatgagatttgggtggggacacagagccaaaccacatcagttggttttcatcttttctattgtaatttagagcaaagggtaagggctagctttggaccctttcattgcatctttcccctgcactcagacctgtaaagtgcttctctctggggcaggggctgtaatacttaccagcctctttcagaatccctgccacagccaccctcaattcatgatgagaacacagcactagtaattagcacatctttgttccacgggtttcttccttcatatgacctgtgcccctgctcagtgtggtgagacttcatttccttacatttaaaatatttcctcattggagtgactcaaagatttcatgagatacctgtggtgtcatgcaatatatagattggatttgtccactctgcctggtttataactcccatattccttgttacagtcttttgctataatgttgggtgtgttagggcccaggggaaggcctcaggtgatacaccctctctccttccttcctttcacttgccccaaggcaggactctcatcttcccctgtctttctgattgtgggtcttaagaccttcctctgagagggtcccacctcatacccagggggaggaatgctgattttatgaagctcccctaagaacctatgagggctgcgtttggagagagagcttccagatagctgaacgcgtggaggttcctggatggtggtgccccggggaggttatggaagctccatacctcttcccccaaaccccaccctatgtgtctcttcatcagtattatttgtaatatgctttataatagaccattaaacatgtttccccgagttctgtgagctgctctagcagctctagcaaattagttgaacccaaagaaggggttgtgggaaccccaacttgaagcctgttggacagaaatttcagaggcccaggcttgtgactggtgtcttggggaatggggaacagtcatggggactgagcccctaacctgtgggatctgacactatctccaggtaggaactgaattgtaggacacccagctggtgtccgctgcttgatgtgtggggaaaacatcccatacatttggtcacagaaattctcttccatgttgatgactgtggtagtgtgagagtagagaaaaaatgcagtgtgagagagtttttcttgacacaacacttacgtgaaagtacttggtaaactgcaaaacagcagtagacagagtaatataaaacataaaatatactaataataactacaaggtactgagcacctactacgcgccagatataaaaaccagatgtcgtatatgcattcaattatcttatgctgtcctggtaaatccccacagcaacagcccacatttggtgttattgtccccaatttacagatgagagaacagaggctcagagaatttaagttagtaagcggcaaagtccaggattcaaaccccaacccagtccatgctcttttcgctacaatgctgcttccaggtgttgcttattgttttcctcaccattcagagctaaggcaaaagcactgtttaacgcccttaaggaatgaaagatgagattacagaagtacaatttttgagcaaattgccccttgcctacatggctggaaaacacatcacagtaaaacagtcaatgtgtatacttcaaatcagccacagatctggaaaaaccttagatcccacaatttcatggtagctctgctatataaagcaaagataagaaaaaataataatatgaaatcccgtaccaaccagatatgagcttagatttttcaccaaaaattctcatctggtagattcccaaatcaaaattggtatggggaaggaagaatgaaatgaagtatgaagacttagcttttctccacttctgaaaaagtccattgttgctaagctgttttcccaaacagaataagccttctttagtctcgaggctcaatttggtctacaacattaataaaacgatatttacaatctttacaaaaatcaagtctttcattaaaaacagggttttgaccacactaatctttccattcttccacttaaaaaacatgggtggttgtaatatacccaccaattcccaccctcttagaatgttctgcactgtggttcaaagcccttagaataaaaaactgctccagaaagcaactcagccaatgttcttttattctgttaagaaagagatttcatcagcagaagcattgagtcccttgaggcttcagggatagaggcttctgaacacacatttctgaggagataatcatggtggaggtgactttactcctcataatgcctccaaaaccatcatgagtagtgattgttgcaagaaactaaatactatttcaaacgtatgtgctcagggcatttttgccctttattaaatgacctctgtacatttatgaacagtctaaggattgtctacctcaatacctaaaaaaggaaatgatgccaccaaatagcatcttgacttctacagattttactttccaaactcaagttccatcatcatactcaaactcatgtttatctgatgattgtatgggaccaaattctcaactaaggttctgggccaaatggccaggctaatgcttcacgatgctctttcaaatgcctttatttgatagccctggattctcaagcccttccagatgggtggttctcaactacggtttcagattagaataacctggggaactttaaaatgtctaggcactacccctgaccagttaagtcagttctccaacctctctttatagactgtggcttggggtcttctccctagctgagtgccctcccgcaaatacaccaactcctctaagctctgttcccagaaaggcaacatttctaatggcattgttcagaatatggtggcctctctcgaattctgacaaccttgcctttttaaaggaaggtgttgccagccacatctcaataaacaagcctgtcccccagcccttatatttggaaatggccatggtagtgcactctcccgaccccattcaaccccagctctttctctgcccaccggtctacagagtcttcttgtataaaaatgacattgtcttcctttgtagttctagccaaaatcattagttatctcttttctttcttgttgatatcaccacgggtggatgccaggaggagggttgtcttacccaattgcttggaggggaaaaatctgtgaagtttaaggaacaccatctaaaatcctcctacttcattctattttcaaattcttcttctacttaacctatatctgctagttacaattgatctctcctctctcctctctctctctctccctccctccaatatatcaaaccactgctttgttctagcctagctctataatttcataaatgacaataattcccctggcaagtacactgtattaatttcttaagataatcccatgaattgaacactaccattcccattttacagatgagaaaactgaacctcagagggtttaggattcacagctactaagtagtataaataggattcaaactttctccctacccctttctttccctctctatagcattcctttcttccacttctttgcctttttaagtttttttcctagcatgctatcaaattaagttatgaaaaaaagtgtgtttctgtgtgtgtgtgtttcaatgttatgaggccgaggagaaaagtgaatgaatgtgtcattttttatttatttattttagacaaaatctcactctttgtcgcccaggctggagcgcagctgcacgatcttggctcactacaaaccccgcctcccggcttcaagcgattcctctgcctcggcctcctgagtatctgggactggaggtgtgcaccaccccaccaggctaatttttatatttttagtagagatggggtctcgccatgttggtcaggctggtcttgaatttctgacctcaagtgatcagcctgccctggcctgccaaagtgctgggattagaggtgtgagccaccgcaccaggccaaatgtgtcatttctttaaggaaacatctggcatctactttataccaaaaactttactgggcccgttaacccatggtatctttcctcaaaatagaatcagtgacttccttgcctttgttatgtcttcactgctcctcttttcatgcacttgtaacattattttgtaacgttttattaacacgttcaagttccttttaagctgcaagctccttgagagggtatttcttactaaagactcaacaattttctctccttagcacaagggaattgctcagcaaatgcttatgaatgaaataatatgtcatttaaacatcagagctattgtaaaatgtaagtggtatgactcccattttacagatgagaaactgaagttgagatggaattaagtgagttatctaaaactgtggagccaggaagctcagggctttttcctgcttggcacagtcatctatctaataatgacttccgaaatacctccaagcttaactagacaactaggtaataagtgggaaagcactttggaagagataaatccctaaaaacaaacaaaatgcaatcattagcatcatcatcaacattgaggggcttaactaaagcatttccttccattaaaagcactattttgaaacacttagaaaggcattttccagtttgtgcatctcaggatcccatctttgctacagctctagctgtaagagtccttcccatttgggggatgcttgctgaaggtagtgctttcggaagtaaacccaatcctgccttggagacatattgctaagtgggcactgtggctgggcacttctgaccctggttctctcctctggctggatcagcaaaagggtattgctacggtcttctctgtgatacatcttcagctcccccaagcaggagctatgtgtgaagatctctgtggctctcaggtccagcacaagcacaggtgaacagcaaatgcctatgaatgaatgatcgcccaaggaaaaacattttagagtttatgtattatcagtgggcaacaaagtaataaccccaatcagttggtatgcagagtgttcataagcaatgaagagtgcatttcagtggtgggaaacccacttgtctccagaaaagccaatgggagagtcccaagctgggttctctgaaaatcaatcagactctgagagagattgacaagcaggagatgtattggggaagcttcacctgtagataaaagggaagaggagagaaggggaagaggaggaagggaagaggaaagaaggagggaaggaaagggaagggaaaaagaaagggagtgggcagaggaaaggttgaatggtgatgcagttggagcagtggctaaagccaaccccaggggaggccctgaagctggggttgcttttacaccctgtgtcaaccagtgagtagatgactttgagtgaggcggctccaaagggcaagttctgaaggggggctgttagtgtcacaaacaagtgggtttccctcccctgaaatgcactcttcattgcctatgaacactttgcctaccgattggggtcattagtttgttgctcactgataatacaaaaactctaaaaagcttttccttgggtgatcattctttcataggcatctgtcagcatcaattgtagcgaatggggaaagtccctcattgtttttttttttttttttttttttttgagacggagttcactcttgttgcccaagctggagtgcaatggtatgatctcagttcattgcaatctccgcctcctgtattcaagcgattctcctgcctcagcctcccaagtagctgggattacaggcacgtgccaccatgcctggctaattttttgtatttttagtagaaacggggtttcaccatgttaaccaggctggtctcaaactcctgacctcaggtaatccacctgcctgggcctcccaaagtgctgggattacaggcatgagccaccacgcccagccccctcattcttgaaggtggatctgagcagcacatcacagagtcctccacaggaattttctttctaaccacactgcagtagggtactcctttctgttagcagagaatctccatactctcattaaccttgtttataaagttcaagtatgtttatgaggtagaagcattaagagtcacagacagtcttttctaagcctcaagacatcactaatacctggttggtattattaggttggtttaaaagtaattgcggtttttgccattaaaggtacattttacctttttaaaatagtaatgaacacaattacttttgcaccaacataataaaacttaaacttaggtataaatttataactgaaatataaacaccttttgccacctttggaggtaaaatttgtatttttcctgattaaagtgacagagcctctgacttacagatttgctctgtttggcatgcgtgactgatgcgtttagacgccagttcaatagagtaaacaataaagcatccgttcagttgcaatccctatccaaatctatcagtacacatggtctagcccagtgcatttatatctattaatatctcattgtaatagcagtcattaattttacacatttataattgtgtcatgcaagtaccaatgcaacatttctaaacctaaaacccatataagactacaaaataggtgatctgaaagctctatcatcaccgtaggccaaaataagtgaacatggatattaactaacttctagagaatagaataatataactcaatgagagacaaaacaaaattggaagggtatcaactccacacatataaccactcatgtatctttgttcattcatctaatcaacacaatcttatgatgcctgatttgtcctgagcactgatctagtcactgggaaatgaatgatgagtaatacatagttctccctacatggagactgacatgcaaagatgccaagggcaggataacctgggaagggatcatgaattagtaagtcaatgggtgaaggaatgaaagataaatgcaacgacaaagatatgagcccagcgctatggatatggtccatggaaattggagggggcctccaaagtagagaacaatgacactccctttataaagatactggagttttctgggcacacaagggggataggaagaattccaggaagaattcactgcagggataaacattatgaaagggacaattaaatcagagtgatgtgaggatgccatgagagttgttctcaaagtcagcaggaaaaataagaatctgagatacttgttaaaaagcagatccccaggccatgcttttaaggagactgagcagatctggggggtgaggctcaggaatcagacttcccaccaaggttctcctcttggctgaagagccacactgctagtaaccactttagtcttgactgcatggtaatgtcttacattttcacctattaacatgtttgctgttgataatttgatatttactagtaattgatatttagcaactttaaatggttttcttctattcctattttttcttcatttttattcaaagtggctgataaattacattaaataacttttgagtatctcttgatggaatcattttaaaatgcctgtttaaatatattgaagcaatgatatctgcttcacagcagctgatgatgtgaaaaggcatttgcctttgaagaaaggagcagtctcttattttggtgaggccctactatgtgctaggcattttacattatgtccattgaatctttgtgagacttcttctgtaagatttgtattttttgtctctgttttacataccaggcaactgagattcagaaaaagttgagtggcttgttcaggtcacacagatgcaaaaatagaagcaaaaatggccttaaacccacagaagcaaggaagttacaaggtctagagttatctaaaaaatgatgtcatttttttttcttttcaagaacagagtaccaccctgttgactttagctgtatgtccgtatgtcttttaaattcatcttgttccttcactcattacacaggcacttactggggttcactgcatgtgttaggagttccatggagaataccctaatgagcaagcaacatccttaagacaaatttgctcctgcccataacataaagcaactgcagttcagagaaaggcgccattcccacaggtggagagaatcatgagagacttcttgtagaaggcagtgtttgatctggactttgaagaatgatatcggatttgaatatattgagatggaggagatcagaaggctatagaaaagcccaggagtcccatggagtatctgtggacagaaaccagcccaggtcacggttttctgcctcggagacatctgcacaaggcatttgtccaaggctaagtgaagtagttacgtgctctctctcagccagaacaattggtaaacaccttcgcgctttctcaagaactactacagtaaaatacctctgttcaaaacaattactgtgcctatcacacaccttgaggtaaattaacctgtggacacatgccaactcttaatatcctttaaaaaggcaaacactgaacaactgaagttgttggggtctgctttactacagaaaggcaaaaagggatcccagagaggcatttttgtcagctcagaatgtgaggaatagtagctgctatttataaaatacctactgtgtgccagccactctacatacacactctctcgttgcccttcaccaaaacactgggaagtcaccgctattatcatgattttccagatgaagaaactgaggctcagagtgtttctatgagtgttccaggtggaaacaatctcacaggagaggcaaacctagaattgtgaaataggcctgacaccaaaacccacatgattcacatttgtgtgtgcgtgtgcgtgtatactggagagacaataatgggccttatctttaactatcctgtgtccctgggtccccagatccctctgttccatagctccatttttattgggctgttatttatcctggtcattaacacccctttcataacctcttgctctaaccctttggctacctctgatgcagcagctcagtgccctcagctctgactcctctcaacatgttgcctgtgcacagcactgcttggaagaccagccacatcatgtggccaatccccaggacagcagagacaggactgccccagcggcctccttaccagcctggaatagctaccacttcttatgcctagaagggcactgatggccatgcacagaaacgaggccctacaggcagacagacttgcatttggtacctggctcttcttcaacctggctgctgtgctccaagcacgtggtccaggcagaagtgcccccatctcccaaagaacagggcttagtaagaagaatgggtagggcttgtgggccatgtggtcctgagttcaaacttaaccctgctgcattctggctgtgagcaatagacaagtcttcagacttcagtcttaacatctaaataaaatcaacaaaataacatatactttgcagggcttgttataagcattgggtaagtatatatagtagggaccaactggtaatgcctttcaacttctgcccttttgtagtctggtatagggtgcgccttattcacttttgtgcctgcaacatcaggcacgggataaagtacatggcaggagctcaataagacaggatgaatcttgactgtcacactcttcctacgctcaaaactctagggcaagaattggcaaactgtgacctgtgggccaaatctggctcactgcttggtttttaaaaattaagttctactggaacacagccacactcattcaaacacatagctatgacttcatgctacaacatcagagttgagtagatgcaacacagaacacaagggtttgtaaagccaaaattatttactgtctggctccttatggaaaatatttgtggaccactgttctcatgtagggatactttcaaagatggagagcacttgatggcctctttattttgggggaaatatagaattcctctgctcctcccccatccatactttatctcctctttccctagtttatttcttcttcttagctcttaccactacatactatttatttttgttatatatgttgtttactttctacctcttctactaaaaaagctccacgtgtgcaggaatttttacttgtgctaactcctatatacccagaaccttgtccaatgcctagcatgcagaggacattccacaaatattggtggaatgaataaacactgatttcattgaagagactggtgagccaaagtgtgttgaagagagaacacacttcaatgaaatcagtgtttattcattaaaaggaccaggtggcccctgatacctatgaggagggtattacttttcctattttatagataagacaactgagactccagttaagtcagtgattctctaacatgcatatgaatcacctgcgaccttgttacaatgcagattctgattcaggggtctgggctggggcccttgatgctacctctctgacaagctcccaggtgatgctgatgctactggtccagggtccacacactgaagagtgaggcttcaaggctccccctcggggcatatactagcacatggggggccatcatttcctttctgtttcctcttcctcatctccatggctctctctcaatcctatcatctccaaggcctctccctcctcccccactcccagactgttccctgtccccaaacacctcgcctccagtccttcacttccatagcccccaactccagtatcttcagccccttccttctgcccaggctcctccactataactaaatctttgcccaggactttctgatctttcaggtagccagtatcatgtttcttctctgttttacaaaaaaaaaaaaaaaaaaaaaaaggtgaaaggtgatcctactcatggtccccaggcaggctggctacctcttcaaccttcatccctacaacctgtacaagttacttctgatggccaaatgtccaggctgtgcccaaacccaccccctccatcctctgcagcatctgctatggccaaccaactcctcctgctgcaaaagccttctcttgggccttacgcttttctcctacctgtctgtctgctttgccagttcctctcctcttctgattctttaatcatggtcagttcctgggcctcagcccctagcccttagccctctgttcttgtcccctttctccaggcctgctttcatccacctggcactctcatctgcaacctctcagaggaaggttccaaacatccacgtcctacctagactccacttctgcatttctaagttcccatgggatgcttttgcttgggagctccaccagcattctcactgcaatatatccagagtcatatgcatatgactcacatgaccatttctcaccccaagacgtctccatttccaggataatcaattctccctcccatctacttctgggtagctttgggggaatgacttagcttctcagagcaatttctttcccattaaatagggataatggtacctaccagactaggctattcggaggacttagtgggctaatgtatgtacagactacttggcatgtggtggtggtttcctattctcccctcctgtataaatgattaaatataccttacctgttcgatccctttaagtctagcaactggttcatctatcacaagtgcttggtggtagttgggatgggaagatggtgcttaagaggaaatgtaaccacctaaggtttctgtatagaaggcaggctatttgcagtggcatacaatatatgaccgtcatgggggccttggggttggtgaatataaaatgaatataattatggaaaccctgtgtcctatccagatgcttctgcatcccactgctggtatgagcttcctgctctgggacctgtggcacagaacttcatgtctgcaccaattgaaaggcctgtgtttatcattgcaccttcaactgcaagtatgtgcagatccatcctctgtcctttcacactgcttatcttggattccaccccagcacccagcacacagcactgtataaagtgggcattcaaagaccctgataggcaaactggctgatagagggatgggggttagatgccagaggtggtgatgggtccctgtatgcccacatctgctgtgaaacatgcataccctaagaggccctggaagaagagaggggctcccagggactactattcctgccatgaaccctgtggtttctgaaaggggaaataaagaaaactaatatttcatgagtgtcaactttgtgccaggcactttacaaaatcatctcatctcctcttcacagcaactctgtgagtcaggcaccattaccctcattttataattaagagaaaagagaatcaaaaagtttagaaaatttgcccaaggctctataaccagtgcacgatagaggcgggacatgagcccagagctgcgtcactcctgaagctcattctctttccaccatagcaatgacacaccatattgtttcgtacctccgtgtctttgcagatgcagtttcctctaatcagaattttaattttttcagtaatgggtaaagccatctctgaatacactgatacctatcccctgccacacaaaaaattcatcactcaactaagtgttcctgtactacagtatgtagaggcatctctcagctaacgtttctaataggtgacgttatgctagtctctcagataggcttgcatactgtgaggctgaacctctgggttctagccatttcttcatccacaccatatgaaacataatgtgcatgttcaaagcatgtttgtgggatgaatgaataagtgatctggtacttccagtattggtgatgggggcccatttgttcccatataacatgagggtggtagtacccgtcctaaagacctgtggaccccacactgagcagaggggatggggaggccttttgctggctccatctttatctatgaagccttcagcaggtaatgctattaggcacagcctctctcataaagctgagtttgccagaggtgagggaagacatggagcgctaagcaatacattttaccggaagccaggcattctctgttttaatcccactcttttgctagctggatgttcaatgaattcacatccttcaatctctttctaaggtccctacaacctctcaatttccaaaaatagaaagtgcatattaggaatgtggactagttcaggggctttctaactttttatcaccaaggatctactgtacagagttgttctcctttactatcatgttttgagcatctctgttgttgttgttatttattattattattattattattattttgagatggagttttgctcttgttgcccaggctggagcgcaatggtacgattttggctcactacaacctccgccctgggttcaagcaattctcctgcctcagcctcctaagtagcttggactacagacgcctgccatcacgcccagctcatttttgtatttttagtagagatggggtttcaccatgttggccaggctggtcttgaactcctgacctcaggtgatctgccctctcggcctccaaagtgctgggattataggcgtgagccaccgcacctggccctctgttttattaataagaaaaataatcacttttttttagcaagtgcaaaaaaatggataagcaagcacccatctataactcccaacaaaatgcactgataatatgagataaataatgctaaacaccaaacacataatcccaacccaaagcaaagacactggatgtttctttcacctgtgaggccggttctagataaagtaatgaatccctgcagactttctgaaatagcataaacagccaatgaatacctttctaaactttgagcccccagggctacccattctccaagtaaaaacacatggatttagaagttgctaagactgtgattctgtctcatgtgtgcaagtcctacagcaggatttggtcccctgcttgatggaattcagggattcctaactagaaaattacactcacaaaggagaaacagcccttcacatctctaaaaataagaggaaaaaaatccaagatggtggaaacataacgaacttgaacaatgacagtgcactttcaaatgtaacacatttatgcaaaataaaaactttaaggctacagacaacttagacagaagtgaaaatgagaaactaacagacacttggttggtgcaggaaatgcatgctacaggttcccttacagggcacgaagcaaagttaacaccagctcgatacttacaagtaataggagtaggaataagcatttcttctatatattgatgggcagtcagatgaaggaaatgtccaaaatgggggaaaaagaaaagacaaacaaacaagaattagatttttaatgaaatcttgattcttagaaatgcacatattatttcagcatccctaagctcaaggagatgcaagttcctctactaatcatcttcactgagaatcagatatttccagtggtagaagaaacaagagagacctcttctataatagggaaacccatggtctcacatagagtaagccatgtttcatgttggctgttgtagttggttcaaagttcttccttatggtcaaccaaaactagattccttgtaattatgatttttttttttttttttggtcggcggggtgcaggtgagggtattggatcagctctctgtggcttcctgggactagtctaccactcttccctatgataatgtcctgtgatctaagcaacaccaaacttcttctgtctcctctatttcagataaagtcacatcagagtctatttagtaaggtcatacccaaagcaaggaaatcatatagccagtacccaagatggctccccagtgatctgcacttcctagtattcaggcccttgtggactgccctcccacagagtcaggactgaccctgtgtgaatagaatgtggtaggaattatgttctgggactttccaagctggggaaaaaaaagaagcctctcagctctgtccataactctctcttagaaccctcagtctccatagaagaagcccagtttccctgaggctaccatgctggagagatcacaggagagcctctgagactacataaaaagaaagaaatgtcccaccagcccccagccattttactttcagccaaccaagttatctcagctgagaccattgacattgcggaacagaaataagtcattcccttcaagctctgcccaaagtgaagacacatgagaaaaataaataactgttgctctttaagccattagattttgggggtagtttgttacatggcagtagatgaccggcgcaaagtccaaccttatcttggaagagcactgtactgagagagaggagttccaaccttcagtctgaacagactctaccttgaataaactctctgttccttcatttctgcatctgtcccttaggtccattaaactagatcagtaattttccaactgtgttcacagaagtctgggggttctatagcagccactgtgtaatgaagaaggagggtactgagcaagtgaggctgctgccccccaccatccaccaaagcacctattttatatattgaagttttatctattttatactttgaagtttcatttaagatatcatatggctgagaattccattctccaaaagaaagcttcaaaaatcactggcttcaatctctttccaatgttcctactggctcctggcttctaagcaatcacaaaactcaaataaaagcatgatattccctttgttataacttttcttatgttgtaagaaaataaataggagtgttcttatttcacatcagattcagctatactgacaataaatgatacatttatagattgagaaaaatggctagataattcaggtctccaaatatccatctgagtagacaagaatggtttccttttttcttgaactatttgattacttgcaaccattatcccatttgcttggtacaggaaaatacagtcgttataactgcagagtgggggatacgtcttcacagccccaaattttcccatctcaagtaggaaatatccaaaactcccaagatggggctatctctagtctttctttcatcatctcatctcctcttcacagcaactctgtgagtcaggcaccattaccctcgttttataattaagagaaaagagaatcaaaaagtttagaaaatttgcccgaggctctataaccagtgcatgatagaggcgggacatgagcccagagctgcatcactcctaaagcaaagcccaaccctacacacccagaaggaaagtgagtctaaaagttaagaagccacagaagaaggaaagccccatacctccttagggggctgagctagggaaaatgagccacagtgcagcaagatctggccacatagaaaactgttcaatatcctggactgaaagaacagtgaccctagatgatgagaaggtgaaggactggggactgcaatgagtgggaattggaagctcctacagaaagtcatcaaatccccttcaccagccatacacgttagcactgtaaggagataatttctttacctcactgctggcaggtccagtgcctggaaggtgattcccctgggacacaaaactcagggtccatttgatgaagacttataggacacctgtgttctctgtattgtcaagaacactgagctgagaatcaagaggccagcattataatctcagatctttcaattgctcattgtgacatcttgggcaagtaagttcttcttcttccctttggacctctatttcctgatccatgcaccaaggtggatggcatagatgaccgacagctcaaacagctttcaggagtggaaatacaataagccttagcatctcagcaccatcacttaactaactgcatgaccttgaacaagtcactaaacagccctgagtcccagtttctctatctcaagcttggggacaataattatgtattcccaagaatcaccataggcattagcattatattaatctaaattatactcacattagatatgatatgtaatatataaagtattctatgtaaattccattaatctaaattgatattagattatattaatctaaacatctggaatgtattagggctcagtaaagggtggcttatgtctgcacctcatccacagagataaggtttactgcttcttattctggtcaccaggaacaaagtgttcacctctttaggaataataaaatatgaacaaatacttattcagcacttactgtgtgccaggtattgttctcagctttagcacacattaactcatgtattcctcacagttgctctaaaagataggaattagtgccattcccactattctgatggagacactgaggcaaacaagaagtaacttcagatcacacagctagtaactggatttgatagcaacatggctataaagcttgtagctcattttctttctttttttttttttttttttttttttgagacagagtctcactctgtcgcccaggctggagtgcagtggcgcgtgatctcggctcactgcaagctccacctcccgggtccacgccattctcctgcctcagcctcctgagtagctgggactacaggtgcccaccaccacgcctggctaattttttgtatttttagtagagacggggtttcactgtgttagccaggatggtctcgatctcctgacctcgtgatccatctgcctcagcctcccaaagtgctgggattacaggcatgaaccgccgtgcccagcccatagctcatgttcttgacctcaagcctgtgctgctttcaaggacagaagaaaatggatatatcttgagaaatctggggagtcaggcactgggatgtcaaaacgttatctctttcaatcctccccacaaccctgaggagcagatataattactctcacggttagctgaggaatctaagattataagtccatgcctcactaggtcaaaggctttgtgtatctttggaccagttgcaaggcctccatcctgagctggatgctctcactgtcagcagccacctcctcctcagctacactgagcattctggaccttctagtttttctgctgtcaaccttcaggattcacctcagcctgagccaagaaaacatgcttccttcttcaccttcaaaccacagaccaccttttccaagttgcttttctgagttatcctgggtgtcaccaaaagccttctcgtgctatctctgacccagcagcaaggcaactccaggataatggtaactgacaaacttctattaattgaatctcttttcccaattaaactgcaaagtcttctaggtcaagtatcacaggtctttattctgtgaccaaaacagtttacatgtgtgtttttctctaagccttgaagaagatttactgaaggtctaaatttacaaggatacagtgatattgcaagtaacagattgcctgaaaccaaaaatcctgagcaggaagacagctgtgcttagaaaaaacaaaacaaaacaaaacaataaccccaaacttaataaatcacatactgcagaaccttttttcagctagctcacaagattgacttcaggcacagttttcttttgttccatacaatttaaacaggacaaagttgtctatctaacgacccatttaaccacctacccatccatctagatcacaaacccacctgttcagccatctatccatccatccatccatgaacctatccatgcattcatgcatgcatgcatgcatgcatccatccatcccatccatccatccacccacccatcatccatttatccatctttccatcattaattcagcagaaacttctcaaaggcctactatatccttatctctgtcaagtacagatagaaagacatatgagatcctaatctagtccatatgtctgatgagagagccagactagcaaattataaagcagatgataatagctgtcacttaaatactgggagatcaatcatgtgtcaggtactgttttaagtatattgcatgaactattttatttaatcttcacaataaccttatgaggcattattatccctgtttacagatgagtaaagtgaggctcagagaggttaaggaactttctcacatttatatagttgttaagtggcatggcagggatttgaatccagggagtctgatttaaagagcctgtattaatagctattacattgtattatcttctgtcatgataaattgtatgataaggcaacacatggagctgtcagtccatacctggggataggagtgaggagggaaagcaggcaagatggcccaaaatctgggatgcctgagtggtaaagtaaaagagaagtcagatggaggagaggggaagggaatttttaggtagatggaactgtgtttgtggtttgggcaggtgggttaacaaagtgggaatggcaagatgttggaagggctagttcccaaagagtttaagcagcttggtctcagtcccataggtcacagggaaaacccaggaagtcatgtggccaaatatttcttgtaggtgaattatttttagcaggagggtgaggagaaagtcaaaggcagagtgaatgtggttacaccatcactgactggccaacacaagaaataccaggggcttcctttgcagtggccatgggatggggaagaaaggtcagcagtgtgcaaggtgtttaagacacaaaatcaaaaggtgattaaatgtgaatgtattgaagaagacttccaagttctcagcttaagtggctgtccacgtgagtgcaagcagaaggagcaggattcaattttcaggtgtagaggaaggagcagtttagaacaggatgaacagaagatgacacattttgtttgggcgtttgggcttttttcccacctcgataaatcactcaaaattatgccacagaatttggcatctcagcaggtcctgttttatatttaatccagattagatgatgtttcagagtgtggactccattatcagattgtccaagtttgagacccaactctgccatttattaggtatgtgattccaggtaatttccttaaactctatttccatttcagttttctgatctgtagtacccttaataaagtgcactgctcttttagcttggcctgagttagcttttctgattgtctacccagaaacaaaacaaaacaaaacaaaattttgtggcaatgtgctctctgaaggctcagaccatggcatgtcttccacatactgcctccagccttgccttgccaccctcctaccacaggacttggtgcacgaaccattaatgcttaatgttgacatttaggtctgttctctgagtgaagctctcttgtataatccatagagagttgatctgttctaattccactgggctctcccattcaacatgtttttaggaaattctcagtatttgcaaggcacactggagatgaagatgaatcagaatagacagctgatggtctagtgaggaaatgggatgcaaatacaaaggaaaagtataaggcagaaaataacatgggtcctcccagaggggatctagatggtgaagagattctgtccagatcaaaggtcaggaagggtttataggagaaagtgcctactgaattagtccttaaacatgggtaatagctggtcacatggagctgagaaacacaggcattgaagaagaagaaagttcgtaagcaaaacttatggagcagaggtgagactttaggagacttgtcagaaaaactaagaaaaaaatagaaaaactaaaaagctaagaagaactaagaaacttgtttccatatgggcagggagacagtatcacttgacaaagttccccaggtgacttagacatgtacttcttccctcacttccacctcatgaaccatggctatggagaagaagccattgaagggtttcagatgacaggtttgagagtacgagctttattttttaacacaatgctgactacagtatggaggataggttagaggggtggggcacagttaggaaggtcagtgaggaaactcatgcaatagggctatagaggtctgacccagggaaaagacaatggaggaagaggaggcagaggcagaggcagaaaggaagggagggagggagggagggagggggagaaagagagagagacagagagacagagacagagagacagagagagagagaatgagaccaagagaatgtagagaatcctgggtgttggaatcccatctgtttgttgatgggataggaggtagtgcctgtgaatgagatgggaaacaggttggggagtaggtaatgattttgactttgactacgaaatacctgagggattttcaaggtagatgtccaggggcagatgatatggataatggagctctaacaagagaagactgatcttcaggccagcaaaactacaaccaccgggtagtgtgataaatacacaaatgaagactagcatgtatggcacagtggctgcagaggaacatcactggatcttcctggggcaggaggctggtggaaaggctttgctgagatggtaacatttgggagtcctactaggaagaacaagaggctgagagtcagagtgtgataggaactttgtaggttaagagaaatctcaggacatttcattcagggaaacagcatgctcaaaagaagaaaatagcgaaattgggaaaaacaagccccagagaggaaagtggtaccgaatctgagtcacatgtttcttagtccaggatttgcttatttcctgtcagtctccatggactgacagagtagaaggtagcagcatgagctctagagacactgagactgggtttccacatcaactctgcccaaaacgttcaccaactcacgtgatcttttcgaacttcagtttcttcttttcaaacaagcaacagacctaacctactatgattattaggaatattaaaatcagagtatagctgcagtttaaatgaaaaatgatgcaaattatgtcagtgtgtgagcattgattgcaaccctgccattagcatattagtaacgggtttggagctggcctggtacagttgatggtcatgtggagatgaatgtttctgtagatattgtgcattgtaattccttaagcaggttcagggaacaaagcctatttcaataattagctcatttgatctttagaatagccccataaaactggctacctttcatagaagggaaagcaaaggctaagatttgttaagttgcttctgcaaggttgacagcaaataaacaggactaaaaatttggggccagtttttctgattctctgtcccattagactgagagctactggagggcaggtacaagtcacagagaattgatgtataaccagagatgcatataaaatatcagaatagacattcatatttatactcaagacactccaaatacactcttggaacagaagtttccatttggacagacaaggaaagtttggcaaaaggttaaggctggactaggacgagctgggcaggggagcaggggaggagacagggtctggctagaaccatggatggtaccaactttgaatatacctccctaaaatttcctagttctcatttgaaaattaaaatgtgatggacgggttagtgtaggatccaggcaagtccaggggtgcggatcttgtgaaaagtcctgcataacttggctttggtgtttccctatgcataagtgcatggccatgctttgagctttaagggaccatgttcagactccaggaagtgtgtcccaagggataaaatcgagctatatgaaacttgtgtgcgcatacatataatttcacgctccacaaacaaacattgaattgtagaccttctcatatgtgagtggctaatgaacactttcaactattgagacatgctggttaaggcaataatacttgatcttttcatcttaatttgcattaaaggcacacagtgccccatggtattaagttaagaaaacatagagttggtcatgcaacctcttgattgctggttttggaggagtggggaggatgtctaacagttctaaggggaggaggcaagggacgaagatgatcaggactgcagtgctgagtcagtgatgaaggtctttctcttatgtcaggacttaacatggtactcatgaaaaggaggtacattttactacataatgacatggggtacccattacagaacattcagaactctagatgtgatcgacagatccagaggaaaaagatggagccactatctagtgacagcagaaggatggatattgtgtagttggtgtggctaaaaccacactggtagttaactctgtcagtgaggggctccaggatcccttcttataatgctcatatcatcctgtttatgtccatgcaatcctaattccatatggttccacattcaatacagcccagttcaaacagccaaaggtaatgcaaaaagaattctaaactttaacttgcttctctttcaaactataagagaatcccatttaaatcacccaccaacatctcatatccctttctccttttcgtttctcaagatctccctccccccgttacaaaacaaaaccaggcaacaacaacaaaacacctctcaagttttgttgatattctctcttttccctcctctattttgtattcaggtgtctaaatataaattaatttagcttttttcattaaacccttcccttcatccatggatctcaagcccattctctgtctgtcttctagttctgtgtcataaaaggaaacccctaacaggaagagaaagactctctttggacagtggcaaggaagctctaaagtcagtgatcacaaaccttcagagggagaagctggggacatcttatgtttctggaaacatctgtggttatagctttaggggggctttgagtcagctgaatctattaggagcagaaaaaaaaccccggaaagtaaccatgtccatgaccagggaaggcagggagaagacccaggcaagcttaagccagtggaggggttgtagcagtgttggcctctgtgaacttctgagtccaagcactgtaggtgatgataggacactgaggagatgttaacactagtatcctgagctatggtgatgagcctgctacttggaagtttctttgacttgaatacatcttcctttgaggtagatgtagacagtattctggccaacagtaagttggtagcagactcaattgatcagtgtagtatatattgatatatatatgcagctggggggtagctggggacagaagaggtacacagaatttcgctttcctttggggcatctctagacacaggaagacattgtaggttagtggaaagagtgcaggcctatgttcaatttctctcttcctccccattttctcctcttctcctcctaccctcccctcccatctgtaaactgttccaatcaactaggccaacaaaatgtcttattttcttcaaaagatgccatatatgtaaacactgattagcaccccacaacatgcaatgcccaggttttgcctcctggggagaaatggtgatcatgtgatgcctgttgattgggtctgatggacagttttgatagacatgagagttgatgaagatactcagaggaggttaaaactaccacaaaggacttattttatagttgctcctaccctggaaacataaagccttttcctccctcccaaaaagtcacactcacacatttcagaaatagctgtgagaaggaagtgaaatttcttcacaatctcacagatgatggtgacgtgggttaagccaggctttagaaagagcaaaattggaagagcatatctgatttacaaatcagtggcaaagaataataaaatttcaggtctatcaaagaggtattcagttccattaatttgggtggacaatcccaaactcacctctgcctctaatatatctgtaactctaagaaacatttcacctctgcctctaatacatctgtaactctaagaaacatttcagtgatcttacatgtacaatgtgcttactgctcccagagaaatcaaaagtcatatactaccctatgtaatagcagcagactagtcactgggacatataatgtggccatgtgttatcagtgatgatggtgatatgacaatgtagtgttgaccttaaccctttgagggctattcacccccaatattaacataataccttctgttacccctagtttctccaaccagaaaatcagtagatggaggagaaccttagctcttaagccattgtgctgggagcttgaggcaagacatgatcctattagacagaaaaatgtcaagaagaaatgtcctcacagtttaatgccctggccagaggctagtatggttgatccaaagcagaaccaggagaaagagagagagggacatcctggggcttgcatagccaagagagggttgactgcatgtgtagtggggaccctagtatttctaaatcactgattgctggaaatggggatattgcttttaaaaaattcttcattttatattcatgtggttcctaaggtaggagctggaattagttgttaggggtattctgttcctttgttctggtaggaaacacatttgatgagcatttttcatcctatagatggaagcaagttcccagcccttgttcttggggttgccctgaactctgtgcataagcaaacccagagcttcaggctgaggtgttggtttggttaataatgtagaaggctcttttgcctgggagcagggcacaatacaccacctagtattataatgtggataaatgttttgtttgctatgatagactgaggagtgggaaggtagagactaaggttggggccctggcattgaaactgagaagacgtggaggtgggaagtagatgtgttaacatggtggcaggcaggggctaaggagaggggcgagtaagactctctgtttagaggaataaccagtgcaccctgtggacagggatagctgatattcaccctttgtattttcttccctctgtaatttccttgtgttatcctcaagccttgtgaatgcctcttaaacagaggatgctggtgtagtacatcttggaaataagggaggaatctgtgtgcatgctttcgtgagaaatgcaactggagaaaacacacagtatgagcaaactagtagctggccaaaggagtccagggagacatgcttttgagaggtgacaaacaacagcaacccagctgggaaggttctgtgggacaggacatagtacagagcctgtaataggacttgtaattgggaactctcacaccactgtagactctatctctcatggagagggcagcctgggatgctattatttgaccagtggaaatcaggggcaaacggaggtgagaatggtaaaacattactttcctgcaactgcgtttctggactgatccatgttcctggggctcccgagctatcttgatgacatgattgataacaacacagcagttaactcctataagactcaattcatgatacgtggaatcccatggcacatcgcggtggcccagtcatagggatcactggcccataagaaaatggccacctcaggaccacctgccaaacaggcagcatgcacccttcaaacagcaacacaatgaaccacagccggcccatgtatttccggacctcaatggttataacagaagatccctgctggacaatgatcaacagagcaaaaacctggccacacagcagtgttgaggtcacctcgggtcagcagagtcttgcaggcagcagcagagactcacctccttttgatggtgagcatcacgcccaggagaatgatgatgaacatgaggaggccagcgatcacgccagccatcttcacggtgttgtccacctgcttctctggctccacagtgttagaattctgggtggaggcacctaggaagggaaagggaaggatagcaatgttgaaagcacccaaacatgcgactagacaatcatcataatgacaacagcttcctttagttgagtgctaactatgtgccaggcactgtgctaagggcatcacatacattgtcccatttaataacttctgaggaccaattccttgtgaggttgggattatcattagattcttttgagatgaagaaactgacatgcagagaaattaagtgagttgccttaggttctcacttgggcaactgtgttgaagcattcttttccttaaggcaaatcaagttaagatttttttttctctcatattgctttgtctctaggatcaaaccatggaacactgggaattatacctaaccctacattattctttcaggtaaatggtggaaataacagctttattttggggcaacacaatttaaataactagatttttaaagataaaaagaggtttttgttttgttctttatagggaacaaatggtagggcaaaaagtttgtatattcaagggaacttgagtacaccttgggttcaaaaaaacacttaaatctgatcaattccatttttagcatttaatactaatgcaacatgctctaccaggtgttaacttgctgacacaatcctcagtagaggaggcaggtcactggccacttactatacatccttagccctatcctgggtaacttcatggatctggcctggtcagtcctcacaaacattcccaaaggtagacgagatactgattttcccattttatagatgagaaaaccaagggaagttgctaaaagtcacatggctgataaaggtcagggccagaattccacaggtttcctgattccaattttagacctcagtggtcagaaaccctgaatcccttcaagtcatctagttcctcaatcccttctccctaaaacaaccattctgcttatgccataacaaagtaagcaggcaaagaatgccaagaaccagtatcttcatgctacgtactagggatcagaggcaacatcttatttcagacattctagagagtagtccaggggttatcagcacccgaagtgaatttcctcctgcttctatttatattcctattggcgccagcctttaagtgggaagcagcttaaagtccaaaccatcctcttcctaactcattccttcttttcttccacatctacatcagctcactcttcatcagccaatacgctttctctgagcctgtgcccctgggagagtttctccctcttctctaaattctattaacactttataacactttgcacatgcctcacaatatcttttactacaatgcaccaatattattagttatttgttttcacatctgtctcctccagtggtctgcaaactcctcaggggcaagattacgcctcgtttatcttagttttcccatgttagcacagattctgactggtaatagggctccctaaatgtttgtggttgtttagtgtttagctaaaaggatgacgtctctgcccacacacatttgttctcatggaagcaaattgagttttctcctttttaaagtcatttattcatagaactcagcagagtcttgagttgaaggaatgctactacccaaaagctatggtcctgattcccaaaatgcactgatgtttaagccctccagcacattgatgcaccccctttttttttgcttaagagcattaagtgtttcctctctcagagcactttccccaagctgttgtaacttagacatgttgggtttacttggccaagtctctctagtgagaatggtaagtcaccctattcatctctctaatgccagtgtctagcacaggcctccctcctcatcattgctgcttaacagataaattataacataatatgagggtgagtgaaccacagttgtggactttatttatccattcaatcattcattattttgccattgagtggccatgtgctgtgtgctaaactatgctgtctgtagagtcagagattctgttcctagaaggacttctggatgaggaattttattcattcctttcacaagctaatggcaaaaccaactcatcaaattccagggctgactgagtagactcttctcatctacagcccagagaattcctgaaagagttggccaccatctcttcagcagggctggtctgacatttagggatggggggacgagggctggttctgaggagctcccatgcagcccccatttcccaggctggagacatgatttctgagatgtggctaatccacaatgtagcaagcataaaggaaggggagaatctcagatccaaatttcctcaatattgatagagtctttttatttagatttggaggaagggttgtctctggggcattcactcactggcacagcccaattttacttagtgtgcctgctaccaggtcctgttctagagactaggagtgcaatggcaaagagcccctagagaggatcctattactctaggaacaatgctattagcttggtctaatgagactcatacttcattccttcagtaagtgatcataaataccctctatgtgccaggcatttggtgatacagtggtgagcaaaacaggaacagttcctgctctcaaagagtctacaattagtggtggttgggggtaggggaatataattaataaatcaagaatcagtaatagcaaacttgaaccctgttaaggtttgaacagagaagcacatggcacttgtaaatagatacttgcataattaaaaaaaatgcattgcttcttggagcaattcacccctaataggggtgagttccaaaggaagacaggctgtaaccaggcaaagggaccatgaaagcagcatatgggagcagcaggagaaatagccttgcctaatggggcaagcaccctgttgtacttaaaaaacaaaaaaaagaaaagaaatgtagtataaccagggcaagaaagcaaggagggaaagatgaaaaagaagctgaagagggcatcatgaatgagtccacacaggatattactggccacaatgagggctgttgttctttaaccaaaggaagacagggcaccatttaagtgttattcaaggagcaatgatatggtcagatttgtatttccaatagatcattccagctttagtgtggaaccaaagtggattggtgaaatgagttttgagactactgcgggcattcagatgggagttgatagttgcttaggctcaggtgatgacagtgaagataggcagatgtgataaaagagacaattacttgaaatagttatagataaaatctgttgatggattggatatggggaataaaggagaaagaactgtcaaggatgaccacaaatctttgcacgatagggtggatggtggtaatgtttacgggttccagacacaatggaaaaagaatagctttagggggaaaatatatctagggcaactggagcttgagatatactccagcaaagtatgtagtcaaaaatgcgatctggagctctaaattaaaggtcagagttggaggcaaaaatgtgtgagtcatatgtacacagatggtatttgaagcgtgggggcctgttggtgaaatcaccctgggaaagaataaagagtggaaggagaaacagacctagaatagagacttgagggtctgcagtatttagtgagtagagggagataagcctgaatggggaacaggagtgaccagacaggtaggaagtaaacctgggagagtgtagtatcctagagccaagagaagagaatgtttcaaaaaggagggcatgatcaactatgccaaaggctgttcccagggtagaatcaagtccacacacaaaggaaagtgaagatcttggatgagtattagaaaaattttcccaaaagaattccaagacattcctaaatagaagcagcttcagcaacgaccataaacctacaaaagaacatacttgagggccacagaagaacattcaggggattcggagaggctgtctgaaagtccagagcctagaggtttagacgaattcaatgagttcagccaacaggcagcagagctgaaatcacagactttacacaggaggtttttagaaaaatccatgcttggttggtctaactagacatcagatacaggaacgtgaacattccctgggacagggaaaatccagctttgcctttggcactctttaggggaacttgccctagactctggatatttgtgcctctgttcatagtggaagtgtgttgacagggttcaaaggtgatacagggatagaggaaatggactaaaggcaagacagcatccacgtgtgactcccatatctgagggatggacagaggatgggagggtcccgcttttgtggcagagtcaggtgtggccacagggattacatcttaaatgctcagtggagcagaatgtgacctgtgatgggagtcataaaaaagcacatcagggttggctactgatggggccattggcaatgtggtgcgctttccacagatgccagcagtaggtccatatagaaggctatctgtctgactcagtggccccaaaatcgaaagggacttttcagagggctatcccactggaagcccttcagtgggataacacctgcgttacttttaccccaagcatatcctttccatgagagtcaggcttagtatcagccttagtccctaaaaggctgtctccgactctgggtgactttgttttattaagcagggcctggggatttgggaactgggagaaggaggagggatttgggtgcatcttcctcatctttaccctccagaggacccaatctgagaataggccaagcaaatcagaattggcatctaggcaggcaccagatgataaatttctccaattggggaagctttgaggctctacttgagtctcctgtgtgatgtgataaccaaaaataatcttgtgaactcagcttgtactgacaggagactccctctccaacatcatgctgcaagcctcacaagcctgacctgacggcacagccaactgtgtcctctgagctctgagcactcccaaaggctgaaccagttctcaaagcagctgctgctgcatcctgctgtctattctttccccaaatgccatgatggctaaggatccagtctcctcctagctccagcccagagtcttaatctggcttttatatgtgctacctgtctactcttacatatggaaacctggtgcacaaggcatggcccttggtttattaagctctacttccctccctcaatattagctccatacatagggtctagttgccatgttttctctctctgctgcctcctcccatgctacccagcaaccctcccagctgattttccccaaggattactgagacctaacaagggcagtgctgccctgctctactctgcactggtcagaatgctctggtgagtcctgtccagctgtgaacccaacctctcaacagggacctccagagtgaagacaggccatgagccttgctactcaaaaagtggtccatcgaccagaatattggcgaaacttgggagtctataaaaaatgcagtatcttgagccctaccccagacctactaactcagcagctgcattgtaacaaggtctctacatgattgaggtacacattgattgagatgcacaatgttccagagattattgactttgaaggtacatcactctgaatcaggatttttcatcttagggaagggaagattcagatgagacctattttttgcctttagatagataaagggccattgtggaaggtggagtagatttggtccctttaatttcaaagctcagagctgtatcactgggtagaagtgacagggggtagattaggaatcaacacaggaaacgtttgaatgtggaagagctaatcagctaaggctaaagcccagaccctttcaatgcggcatcatgttagagagaggatgaggtcattatggttccaaagtcctgcatcagagtcagcccttcattttacctgcttactctgtctctgttctcatctccttggcttcctggatgcacaactaagccctgaggacctcatgtctacaggatgctgacctttttctctgacgtcatcttttacctcaacttggttccccttaattccagtaatactcatactcttggtgagagaaattatccctattatctttagagccatgagactcccatgcagtccattcccaccccctcaccctgaccctccccatgttacccacaaaggcaggggaatgtgtcatcaacaaggacaagagctggctggaacatcctgtgctccccacaaagcagaagggacgacaagacttcttatgccccttttgatgtcgagatgctatggttttatgagtctagtcaaaagcattgggtttcacattggaaatatgcaagcttgcgtctagatgccatcactaatgggttgtgtgaccttgatcaaacctgttaaccgcaatgtgatttgatattctcatttatgaaataattagaaaatgccaagttcacactgggattttctaagaatcaaatgtaataatggagggaaaaatgcttgataaactcttgaggaactgttcacatatggggcacagtgatgatgtgaccttagcactggatccagggtagcactagggttttttgtgtctatgaactgtaggtcatagaggctgaggcaatgcctccttgtaacctgctacctaagttcatccgatcctcaggataaaggcagagcccctagagtgattcacttaactttcctcatataggcaaggcccatatcaggcttgcatctggatgacttaatggcagcaataacataatttggcaacaagggactggcaattaatgattaatgattcattctgaagtgctctcactggtgacaggcccaattctagagctttacttcagagaattttccttgtaaagatatggagcaaaaataggagtcacagataaagaacatttaattgcaattgataaaaccaagtaaatcccaatggatgcataacccatgctggtgatcattgctgacgataaagaaagcaacccggctctcagggacactattcctaaaaactgcactctttaaaacatacagttgtttctcagctatccaagggcatattatccccagtgtggcttatcagaggcaaatcttactttgctggcagtttaccccagtctactgaatggcttcttttgttgaagagtttctctggctttgtatgtatctggcacccagtagggaaaacctttgaaaccctgactctaagctggtacttctacgtcagggaaggttttaagcattacaggcatctctgattatgggggttttgccaagaggagataatagggaaaagatgaagatgctgggcaactttctggctcttctcaagtcaggtaagcaccataaaccttcttgattttgctggaaacaaattctcagaatagcagattatttttaagatggaattaaagtccaagacagaaaagaagttggcaggagagcatctggatacttcattagattcaagcctctagactttacaaattgcatcccaaggcattgagaatatttgtaattgtgatcatgaactactttggcagtctttgaggactgaaattgtagcaaacaggaggggtgcgagaagcctggggagaaacaaatgctgttgctgactttttttaaaaatgaaaaaaaaaatgtatttcagatactttacgctagtgtgatgttgatacaggaaaaaaaaatagactagatgattaaatcaggttccccccacccccacccttaccacttaaaaaaggaagaaataatcaccagaaaccagcacagcctcacatcagacagcattcaaccagggaaaaggaaaccactcctaacttttaaaacagagcaaatttactagaaaattagtacacagggattaggagacaatgctggggaaactcagagggtggtagtatcaggaagccactacccagcccagactggagaaacaaaaagagatggtggagttctcaaagcccagaagtaaggatcacccaacagaagtggaactctggtagacccatctggagacctgaagccatggagtcaccgccaaagaaggggcctgagcccaagagaaagaaggctcctcccttcctccagctttaccatctcttattaaagtctcccattagccaaatccagaagccagtaggcatgcgggtcccatgcaggggtcacctacatgcccaggagcatagggcaacagtaaaggatggttgtgacaccaaatgggccaaggacaagcatgggcttcttataaacaagtgatgctagcctcacctctctttgccactttcgaggggtgtgtgggcttgtaagtcagggagaatgtccagaactgcagcttgattttagccaagtcaaggccaacatggagaaactgtggctgactttcaggacagccgggtgtgaaactgagttcttccagaagatggaaacagaagggtcaagatatctgaccacatgcaaagtgctaacaatgaacaataaagaggtaacacatctagggcttttactacaatccaggctgccgttttaaacccttcacatatattctctcttttaatcttcactgccctatcactatggtttggatctgtgtctgcacccaaacctcatgtcaaaatgtaacctccagtgttggaggtggggcctggtaggaggtggttggatccctcatgaacggtttagcaccatcccctttggtactgtcctcatgacagtgagtgagttctcgtgagatctggtcatttaaaagtgtgtagcacctccccccacccccccccccccgcccactactctctcttgatcctgatcctgccatgtaagatgcctgctgcccctttgccttctgtcatgattggaagcttcctgaggcctccccagaagcagaagctgctatgcgtcctctacagcctacagaaccatgagccaatgaagcctcttttctttataaattacccagtcctgggtatttatagcaatgtgggaatgaactaatacacctatgaagcaggttccatcattatacctatttctgagatgtgggaacagcctctgagagactaagtaatggtagcaagcaggagagctgggacataggccctggcagtctagcacagagattattctctttaacctatcgtactactctgtcacctctctaataaatagggggagagaccgttcagcagagaaatgtgtttgtcttttctcaaatatctggaagaaagaagcagacacgtatttagatctagaatcttccattgaccagccagattaaaatatctttgtattgatgcctgtctctgccgggtttgccacccactctatcatgcagttctatttcatgcatctttcttgaagattatctcctctcatgccctcgcacccacgtatcctattctaatatctaagggattgatgaacatgtcatgtgaaccttgttacatgagccaaattatacagactttgctcaaatgatatttaaacttgacctttttaacttaagttccctcatccttttcacttttcttgtatatcaaccaccacctccaagcctttcatatgttgcagttagttttattataatcgctgggctttctatataatacctttattgatatttagcaaacaaaccatcccatataattccatagggagacaagtcttgttcaaatttaggtgatttttttctgctttgtctccaatattctttctttgatcttgctgtgactaatttttttaaattgctgactacctccccatgcctcaaagcaatgcctccttcaccagatctggttgataatagagcacttgagaaggattatttcatcattcttctaagtgacatcacctaggatgtttctcaagtaataaataaattgcctcaattcatcatatgacagtaattgcttttagtcacgatttaactcagagtcaatgttaagtagctggaaaataccacagagatgcagggttttcaaagatagctctacccttgctgtggaaaaccacttaataagtactgttaaatgcaaagaagatacacatttctaataccccagactcctcaatactacccagtcagtcctaagaagttagaattgacttcatcacagcctatacaactaaaactgctaaatattgctgacagaagttgccctcgttttcggcctcgaatggaggttagcaccctgtgagacaggaatagctttaattgattgtttgaaagcactcaggccactcaaataaattgttcctcaagtgctgattttgcttggtctcctgaatctatgcttccagatagaccttgttttacactgtaaatgctctgtgtaggtcaaattctagttcagtcatgttacacacaccaggaaagacggctaaatgagactctgatagagaacgtcttctggatgtaagaaaactcctttattctattaagaaagtgtcttttttttatccatggaaatagaggaaaacagacttatttatgagcagtcatgcccaactgatgccagacacagtcattattgacacaccccttctatggcatatccttttaaaggtttcaccgttggtgagctggaaatccatttatacctcccaatgacctcaactactttctgttgtgccaaggaggcctaacctatgagggctgccaagacccagctggggtagagagaggattcagtctgtggtaagactaagaccttaagctatgactagagtcaggtataaggttgtctaagaaaccaagtatagggcatactttgtagactgggttaggtttcagaccgcagtcaaggttaatgaccaggatgtggctgaggtaggggtcaaagctaaagcagagatcaggagtcaacttacggctcgggtttagaagtgttatggcagtcagtctgcatccatggtggggtcaaacttgcccacaagtgtggcttagactttattcagaaataaaatgtagcccatggccatgaaaataactggacaaagcccagtgacctccacatggactatatccattaccttggtctcattagcatcagttcaacccttggcttcataggaatagtcctggacattgcctaacctgagtggtgctaggattataatgatgacagtggctatagcaaggtgctgagcatggaaggtaattagacaacactactgtcttggaactcactacttagggggagaggaaagtgcaaactaaaaatcagagttgagtgatgggcaccaacacagaagtgtgcacaggaaagggcatgcccagctctgcttaaacaaaactagactacaaacttgatttccacgtcatccatggtgtgggacacatcagggcattcctgtgaccactcagtggccttctcttttccctccccaccttgactccctgtgggccagactgtcctgctgatgcggatgaagaggctgagtcatctcagtgctgacagtactggctccttgcttatagaatctgtgctttgagcctggagctcaggaggctcaaagccgcttagctgctgcaggcaggagcacccacggcctgcactggggattaagggtttagtctgaagaacagatgtaagaagaagaacataaactctttaggatgccctgcagcaaagtgatagtccctttagagttcttcaggcagccagtatgagagagctgtggtcacactgaactgactgtaattcttcctgtgaagctcagagcagtcccagggcagcaatgggccaaggagaggcttctcaggagcagccagtatagagccaagtacaaaagccaatcagggacagtctgcaggtcatgtaattccgggacactgagaacaggttaccacagcctggcttgtgaagcaaagcccaggccagggcatgaccagcaagcagatgctgagactattcaaagggagaagcagaaaccaaaccaagaaaggaaggtttagagccacagagtggagacctgtctgggccaaatgtagaatacagtcaacaaggggacctcactggggagatggggtgagccaaagggattctctggatggcagctcttggccaaggttttcttgaggtctgcccactttaaaggcacagcccttaaagctcaaccactgcccactggccagtgctcaggatcactgcatttctaagtacattcattttccagggctgttattacaaataaccacaacccaagaggtttaaggacagaaatttattccctcacaattctggaatccagcagtcccaaatcaaggtgacagcatggccatggtccttctgagactgtggcagaactcttctttgcttcttcctagcttctgctagtggttggcaatgcttggcattccttggcttatagatgcatcactccaatcactgcccctgttgtcaatgactttctccctatgagtctgtctttacatgatgtttttctcttcttgtaaggacaccgggcatattggattagtgtccacccttctgactttatctaaactaattacatttgcaaagatactgtttttaaataaggttccactcacaggtactggggttattacttcaacatatccttttggggaacacaattcaacttctaagaccaggtgaagctgagtcatgacccacacagcctggggatgggctacaagcaggagcgggagctcagcatttcactaaatgaaatgcaaactctaaaagggttcacagccaaatggacaggcagcatgtgggaagaggaatgggggctcctgcttggttgtggactgagcagaacacaaggcttctggaaggataatatgtctcagcttcctttgtctgaactgcatagcagggtgcaccagaggccgaggctcccctaggctcatactcagaaacataattcaattctttccaaccaactctggccaaattgatcccctaaggggtgactgtattacctgacttagaggggcaagaaaggggaggagaagcaaagatctgcccatctggggcagctttgtccagattatgcatctgcaacatgccgcttgcagctagcatcagagtgcctggaaaggagagaaggggcacgggaggaagcaggcaatctataggaaggattagtggaagcataagcaggatcagacagaggagccagtaaacacgcagcacagaatttcagattagtgcaactaacccgtgcaacggtaataaaatgagcagcagcaagcacggaattgattgttgagattccagccaaatccaccatgaacatgttttctttcttctagcctttgcccctttgcttttgaaagcagaaacactgaatcactgtgttctgtattaaaagctgatctgttcccctccccaaaggatggatggaaaagcagctctgctcttagtgggaggtgaggagggtagaagaagtggccagtgtggttgtagcagatgccacttgccacactggcacagagtcctaagacagggtcttccctatgactgcccacgattcctgcccccagcccaacctcttttgggccaacaccatgagatcccaggcgagacactgggctcagcaagaccagctccagcagatttgggggagctccaaacaagggctctgaagactcagtctctaggaagcttggcaggtgagtctgcatggagttcaaatactggattgaaaactagtgactcacaattagcccaacaaaatggtagatggtgagtagagtgaggtgcttgaaccatcacaggctggaggcagaagtggggatgggggtgagtataccatgcctggcacatgctccatcaatgtcagtcatctgcttatttattaaatcattcatgcatggggtcaaatgaatgagcactacaatgtgtgctaggcacagggaaagagttgatagaaaccaaacagctccaacaaaacatgcttataccttgtacatatgccatgttcaatagaaaactttgcttagggcgggggagggggttgcagttctttgtgccaagtggcccacccagttgactatctctgcatgcaatctggagataatgggggccagtaaaggttttgcagagatcaaactgtctgaacttgatcctagaggatgagtaaggcaaaccatagagggagaacatctcagcagagagaggagagtgtgagaaggcaagtaccactcacatgatcagtttgaacgggttacaggatgctgaggaggaaataaaattggagagataaaaaagggataggcactaggtggtaaatggcctttgattcaggctagttatcccaaagcacaaggggagccctgggagcattttaatcaggattagactctctctcttttttcttttcttttcttttttttgagactgggtcttgctttgtcacccagactggagtgcagtggcatgaacatggctcactttagcctcaacctcctgggctcaagcgatcttcccacctcagttagggccacaggcatgcgctgccatgcctggctttttttttttttttttttttttttttgagacggagtcttgctctgtcacccagggtgcagtgcagtggcatgatctcggctcgctgcaacctccacctcccggcttcaagtgattctcctgcctcagcctcctgagtacatggaattacaggtgcgtgccaccacacctggctaatttttgtatttttagtagagacggggtttcaccatgttggtcaggctggtctagaactcctgacctcatgatccgcccaccttggcctcccaaagggctgggattatagacatgagccactgcgccgggcctttttttttttttttaactttactttcgtagagacatggtctcactatattgcctaggctgatctcgaactcctgggctcaaacaattcactgactcagcctcccaaagtgctgggattatgggtgtggagccaccatacctggcctgaatcatactcttatttttagatgatcactctggcttcagtggggaataaatattggaaggggattgatgtaaagacatggggaccccaatttggaatctgtgacactaaccttatgagtcccagacatgagttgtagcagtgagcaagaaggagacagagattcaggagagatttcagaggccgtatctatcagatttagtgataaattggatactgaagatgaggaaaaagagaaggcaaggatgatgcttggcttctgaatctgagtttaatggcagtttgaatggaagactggagactgatttctccttgctttaaggagaatatcccaggagagaaaaaggtgcagtgagagcctcagtcatatatgctccctgattagacatttgttttgaagaagcacaaacattaacaatcatctcccacagaacaccctacagggatgtgacaaccctcttctgcattaagtcttttgattcagtggggagacgggcaacagaaaatggcagctcaaatgatgtaccaatagccttgtgtctgtcaagctttgagcatctgttctaagactgttgttaaggacagtatcctaatgcacttgatccaaggctcgtctcctcccccattctgtagtgtcagccttacagccatatgagtagttgcccagaacagctgaggagggtcctctgcaatgatcagcctggctcctggatgtcacctgccctcgtggcctccagctgtagctcttcccctagtcttctggcacagccatgacctttgtgcactccagaaccaaccaaagcactggtcaaggggaactagaggatgcccaggtcaaaggctcagggatgtccacatcctttcacctatctcagctctcagtcttgctcttgccttgggtcactgcaggagctggggttgctgtgctgctgtgcccagccatccaccttatatcctaaagctttgatgagccctgattcatgacttctatttggcactttaggtgccccaggcctgaggccctgatgggctcttacctatttcctccaccactcacgtttctcagaaaccacagttctggcccagtcaccagtcacagtctggcccagattcagtctgcctgaatcttaccaatggtcagcttgcctgctgctcactctctggacctcaatttcctcatctgtaagatgggttaagatcattataatgatggcacaagtctaagataatgaagttttttatctcatgattcttctcaataactggtcatttttagtatttccattttgcagatgagaaaatggggaaactttggggctcaaagcctctcagatagtaaattatgtggcttctgagactgtcctgaaccatcctgccatggtatttcccaatgctggctcagaatgggtgttctctaatgtctatgggcacagagcatggagagtatgattacagactgtcttgagagacctgggtttgaattctagtttcatcatttcagagttgagtgatttttaatcatctgaccctcagtttcctcatctgtaaactgtgactactaacagtactctatttggcagagttgctgggaagtttaaatgagttaatgatgtgaaactcagcacattccatagcatgtaggaagtatgtaacatacttgctgttatatttttcttttcatcgtcttattggacattcccaatgctttgtcccccagagctgccccctctctcctgacaggctgtgcccctgcctctgctgcctgtcttcgcctctctccatgaagcattttcccctcatggtggctgttcaggttggagcttcacccggttctcctgcctctggttcctgttctcacaccatctgtcaaccccttccactgggcacatgctcccttggagggtcactgaagcctcagggtgtccaagctcacagggcccagggcatgaccctagggagactgctgccttgcttcatcatcttctcttggcccacatagctttctcccaaaggctcaaactccttctgcctgggtctgagtaaagctgcccctgggaaagttgctttaaggacagttgctaagaactcccagagagtgtatgatgacctgaatcctgtcactgtgccaaggccgtgatttaaagaatttccagcgaaataataagagagagttttaacatgaggtacacaggaaataaaggaataataagggaagctgtatccaatatcttctcaaacctggagctgggttgagagtgcatccatttcttctgttgaccctcaccatgattaggcctggctgtacagggactcaactgtactatttcacaaatgaagaaggtgaggctcagaaaggcgaaaggctgagtaattggctcaaggtccccagttttaaggaatggagtttgggctccagatgagggcttgtcccacagctcttttttctgtagaaaattgacaatgggcatggggcatggccaagacaatgaagtcagatctgccactggggatgacctttagcacagctactctggcctccagactggacactgtcagtctcctcttgggctcagaagtccaggccacccccttgaggcctggctgaactgcaggagggatgtgaaaagaggccttctttctgcactggtgggcctggggaagactgagttctcttaatgttaattaactggtcacttctctactgcagcctccagtcagctcactgcagaaaagtgcccaatcctggccagaagaggattttaccttatttttctcaatataaacattcctgacctctacccactaggtgactatagcccctcgcacccagctgtgacaaccaaatacatctccagattttgccaaacgtcccctagtcctagagagcaacaaggaataaaaggaactgaatatttactgagcctcttctctacacatacatttctattcaccaactagggacaaagatgaccctagatgtgttacctcttgatctgcactgcccacaatggtagtcaccaagtcacgtacttagagcacttgaaaggtggctggtgtaactgaggaactgaatttaaaaatttattttattgaagtgttctatgtgtaaaatacacaccaaagacttagtacaaaaaaagaatgtaaaatatctttcatctgttgttttctttaattttgctgcatataataataataatattttggatataccagatgattgtgaacctaagataggtgggcttaagattctttgactttacaatgctgctgagaaagtaatacctgttcagcagagactacactttaagtaccagtgcaaacattctgcttttcactttcagtacagtattccataaattacatgagatactcaacactttaatataaaataggctttgtgttaaatgattttgcccaacttcaggctaatgtaagtgttttgagcatggcacatttaaagtaggctaggttaagctatgatgttccgtaggttaattgtattaagtgcattttcaacttacaacattttcaacttatggtacatttattgggacataaccccatcataagttgagaaggatccgtattgagttagatacattatattattaaaattagcttcacctgtttctttttacttttctcacgtgactctaagaaatttaaaattacatacaatattcaaattctatttctattaaacagtatggctctggaggtttataacagaggatgatttttgtctccatggcacatttgggaatgtctggagatgtacttggttgttacaattggggttgacgtgctgctggcatccagtggggagaggcagggttgttgctaagcatcctacagtgcacaggacagccccctgccaccggcccccaacaaagaactatctggccccagacatccatggtgctggggttgagcaatcttgccatagagaatgaattccttgaaggattagccaataaattaggaagacctgaagaactaattggacctagatgggcaaagaagttaaagcttttattgcacttagttctcatgattacctatgactgtggctattcatatttcaatttctccaaataaaaataatgaagtctggaaaagaaaaataaattatccaggatcaccagcccagaaggtggcattgctgagagctgaactcagcctccactcactccgaatgccagcctgtccctgctacataatgtggtcctgcagctctctgagttggtgctgatatgaaaagaggctcctgtgcttaaagtctaatatccccatcactcagacccaggcagttattatttacatcagccattattgctaccaggggacgaacattaacaaaaacaccctttgaaagggatggcactcacaggcacctcacccatcaaatgaggttgagaaacgtgtggaaataaatggatcacaatgaaataaacctgtcagaggaggaacattcagacgccttagaagacaagaggtaagaacaaaagcacctgatatgggactggctctgtttaaagaaaatattatctgactgctcgactggaatagagcctagagaacaatggcccagcagaaacggaacagctcgcacacactctggagaagtattgtttctctgtaaattggtggtgtgcacagtgacgagagtcacttttctcccactgtccatctgcaactcccacctccctttgggaagggcctctgataaggtagggctggggactgatttcagtaaagacctactatgtgctgcaactgcacacaacattcctagcattttctaatggaatttttaatatgactgcatgaagcacatatgataattagttttgcacgtgaaataaggctatgcaacttgcttaaggtaatctaacagggagtggctgagatgaaattcctgtggtgttggcagtgacacactggagtacaggtgtccatggcagtacaaaggcagagataaaacttgcccatagtggatgctgtttaggctcagccccaatctcctttactgggcgggtgtgactactctccagctgctgtgggtgctggcgcaaatggctcacaaatacctcccttcctagagaagtaccatcaggcataagggaaccacttccccaggaggtcatgcattcccatggcagcccacagccagtggctgaccaacaccatggtacaaatattggcccccttgcctcaaggtgggcccaactctttagtacatttcctactccagacctcccctttacccagggctcaggtagatgcagatctccacatccccccttagctttgttctctgccatatctcatcttcctccctttcttctgagaacactctgcaatgaataatttgcacaagaatctccatctcagtctcagtgtccagggaactcaacctaagacattcaccagcagtgatgtctctgagtttgggaaacagggtggcaggagtgaactgtgaaggtactggatgcccagactcatgtcatcacagcctgctgcacctccttctccaccatgataaactgaccgttcagggattagtagaccggaggccattgtctgggcaaggactttgagagaggtgacagttaaaggtttgaaatctccaagaaacttcccattgactaaaaagggaccctgtaataaagaggtctctaggtcagcagattatcttttgagccccacgatggacatcaacctctgacatgagtgggctctgtgtcctttgaagaatggcatacatttatgtgaaatgaactccacctatggtacacttgaggaaaggggctggtattcacttcaaacaaatacagactctggactgggcgtacccatggcagctccttcgatgtctattatcttgtttagtctcagaggcctctgcatgtgtacggtctacaacgtaaatggtgccccataaggggtaggtgggattattcctatttaacaggtaggaaaagtcaggctgatcatggtatgggtaaattgtcaggacaaatggtagacctgatcatagtgagagcttctcatttcctaagcacagaattgttatgtcaacttttttcccaaacttagatcacagctcagctgtcgcttcccctgtgaagcactcctttggctgcacatgggtttgtttattttgaataccatgtacctttcctttgtaacaccacttgaagtggcaaatttatttgtgtagtttttggaccagtggctgtttcttctcctggaaaggcactggaacatatcttcttttgctcatcattgtacatctccatgcctagaacagtgcctggcacccagtaggtacttagtaagcattagtagaaggaatgaataggtgagtggatagatgagtgtatgcatagagggatggagggatgggtggatgaatgaatgtgtgggttgatgggtgaatgggtgggggggtgggtgggtgggtggggtggaaagactgctgattcctctctggtgcacctggcctggaggacccactgagtgtgggcaactctcccctcccacccgcccagggctctggtgatcacctgtggtgaggaggcagagtggagtccccggggtcacctgggcgctgcccattggtgctgaccacaaggaagccagtccccaggcagcatgcagaagagaaggagagaaagaaacacacatgaaaacgtgcagcacggtgaacaaaactgcaattcttgtggctctgaagagctcacactaaatagcaaaagaacatcatgatttaacaaaacagggcctgaaatagatttaaaaaaaatgaaacaagagtaagaggcaccacttatcaagcacccacgacatgccaggtacttttctgggtgcctcacatataatgtttctaagatttagaataacccagaaaggtcagtatgactataaataaatctgtcatttttccaccgaaactacttctctgttagacttccctttctgcataaatggtgccaccatccatgtagcttctcagtctagacacatgggagccctccttttttctgatgtccctcttataatcaatcaccatgctttattaattctaccccagaaaagctcttgaagctgcttccttctctttaatttcattctcactttgttcaagccaaccttgtgtttcacatggattatttaagcagcctgtcgtctggtctctctgcctccagtcttgttccccttcagtcttactctccatccttcagttgaaatacaacagtgctgcctcgttgtccccaaggtaaacttcaaaccacctcactcagctcacaggccctccatgatgaatctcctgcccacccctctggtcttgtctctcttcactaccactgcccaccctgtcccaagcatgacaacagctttccattatcaacagccccccaccttcttgtatgtaagccttccttaggtgagtcactttgcatgggatatactccctcctgctccttcacctggctgataactgttcatccgtcaggtgtcagtttataacctgttacctctagggagtctttagtacgtcagtgaatctgggacagatgccccttcttgtcttcccataacaccctcatcttcccttcttattgcaatatatcactgtattagaaatggatgccttctcttaaatctgtagtctccttgaaagcagacacggtgtcccatttactagtgtactcatgtggccttgcattgtgcctgacacatagtaggtactcagtgaatatttgttgaataaatgaagaatgaatgaagaaatgttgaatcatagaatttgtaaaacttgttcaaggtcacaaactggtaaaggttgtattcaaaccctggtttgtctggctttaatgttcctgtcctttcaaatccacccctcacctctctaaagaaaaacatacaaaaggttgaaaggtgttttaggcttgtccagggactgcagctttctccagtgatccatcaacaaaactgcaggaagttcttatgcaaaattgagaagatagagtattccagaccaactgataaacaaaaaatacataatttcaaaaataatacagatggcaaacttgatcaacagccatgaaatactataaaatttaaccaccagtaaatagtaatcataatacttctcccttaaaaatatgaaaagttttgctgttttaaaagcacaatctaagtcaggggtcagcaaactatgacttgtaggccaaatctggccccccactccctgttttctgtgcagccatgagctataaatgctttttacatttttctaatggtggggaaaaaaatgaaagaggagtaatattttgtgacacatggaaattatataaaatgcaaatttcagtgtccataaacaaagttttattggaacacagctgcactcattcttatacatattcttatatgtatggttgctttggagctacaatgacaaactttagtatttgtgacagagaccataaggcctgcaaagctgaaaatatttactatctgtccttttacagaggagtttgctaactcctgttctaagtggctattttttagggttttttttttaaccccaatgctctcagataggcaagacaaagactgtcgccctcacatgtcagtaaaagaaatgcaaagcttcagagaagagatgacttacatgttcccacttggcccccttcagcagcctcttaactgctctcccattctgtagccttctccctgccttagtcttccttctctgattcattttctaaactataactagggtgtccttccccaaaaaggcagtctgcttaagtacctccaggggctccactatctaaggacaatgcttttatatgtgcgcgcatgcgtgcacacacacgtgcgcgcacacacacacacacacacacacacatacagtggggctacacagagtcctgggtggcccctgatcactcctaacctcatctggtcacactggcctactagccatcattcctttgccttgtcccatttaaattcagtggcatgctctcttgccttcagtgatttgcatacctactcccttggcttgaaggctttcttgacttactttgcaaccttgttcgacatgataattgttactcttctttcaaaccttatctcagtgatcacacattctgaaatagcataccctaagttgatttatgtctcccttcttgcccaccagtgacatcctgattttgccttgacgacagcccttattggacttatatttattcattgcctctcccatgaactactatttgctgagtgtttcttacaagccaggtattatattaagtactttcgatacattttctcatgaaattcttacattagccctgtgcagtaagtggtagtacttatttatttatttttgagatggagtttcactcttgttgcccaggctggagtgcaatggcatgatctcggctcactgcaacctccacctcctgggttcaagcgattctcctgcctcaacctcctgagtaactgggattacaggcatgcaccaccatgccaagctaattttgtatttttagtggagatggggtttcttcttgttggccaggctattctcgaactcctgtcctcaggtgatccacccgcctcagcctcccaaagtgctggaattataggcgtgagccaccgcacccagccataagtggtgttattgtcattggtttatagatggggaaacagagacacagaatagtttagtaccttttcctacctagaatcaaagaccatccaaatctaaagatgatgtttttaaccactagggaatgtgggattacatatcaatactaagttgtactcaataaatgcttactgaaaagtaaatgaatacatgaaagtctgattcagtatttttcactcactagctgtgtcatttggaaaattacatacatttctaaattttaatttctccacttataaagtggaggtaataattatctcatgaagtcatcttgaggatcaaatggaaaagagttaaagccttagttgggttggtgggcctagaggaggtacctccccactccatcctctaggtctgcaacccatgctgtgcttagcagtaatgctcagctatctggggtaggaacagagggacagctggataaatgcaggaatggggagagatttttctagttggtgggcagaatatagtgggatggatcatggatctcagcaaaacacaaaaggaggcagaaacagaaaaaggtcctgtttacatatatggttctagagatgtctcatgtttaccagtgtctgttccatctatccttgggcataggaaagagttccagtcaacttgcagttgggctgttgtcatgtgactagctctcatcaaggccatgtaagtggaagtggcatgagtcatttccgagtgacatatttaagatccaagttgccacttccatgctttctcttcccctgctcaggggttctctgagaccacatatattctagatggcacagcaacaaatatgcctttgtggtattaagctactgggagttgggtattagcttgttatgttagcaaagcctagcctagcctaactaatccagttgctgaggtagaggtctcttgctttctcctgcatcacctggtcccctgaccacatcacgttttgaggattcattacccttctctctttactgtttccaggccctgtacagtgtgtgtgtgtgtgtgtgtgtgtgtgtgtgtgtgtgtgtgtgtgtgtgtgtgtgttagcctgcaaagaaggagctcagaatgctgaatgtctcagacttcccttctgactcttgtcccttctaaagcaatcagtgttgagtgcagagagatgctgctgggctacagatggccctggagcagacaaccctgaagactaactaattttttggtttattagcttcaatatgttgtggaagtgaagaaagttgaggatttcttgagccacctcaccttctgctccaggacttagcttgaatactcctggagacaggccaaagaccatcacatgctaaatattctattatcaattattactagaaaagaggcatgggaagaggttaacaaataggtaggagacagagcatcctgtcagtggtcaatgaatctcatctgtctatagtattaacacaatggaatcagatctgatttccaattctgaggaaacttgagctccttatttaaccccttgagcccatttggcccatcattaagtaataacgatgaccactatttatttagtgtgtgctaagtgtcaggctttacttctgtcatcacactgaaaccttgtgtcagcacacaaagccctgtgactggcacacaataggtggttaatttttgcaaatcccttttaatccctcctcaaacatcacattgagatcccatcaatggggtttaaaatatccaatagagctttattctctttatttataacccttgtctctagcctaccccaaatgtgttccttcccggactcccaattttaaaaggccccccttttcctttagaagatgcaactgctttgcaataacagacttgcgatcaagtcgactcaggtgtctctcagatcttgagtagataattcttatttctagttgagaaagatggattggaactcccaaggtacatgcttgaatggcaagagttaatcctcacttgtttttctgaactctatcaaaccagcttttgtcttcctgagtggggtatggaagtggggtatggaaggggtgtgtgtggcgggggaagtttgagcacaactagagaggctagagagatgtgccagctgttgtagcaagaaaaatattaaagaaagagttgggatatttaaaggtcatatttaggctatcttatgtgtacttatgatatagttctcttcctccaacttcttgcaaaacctttaggaaaatctgtatttttccattgacattttaggacctagaagacagtcagtgagagcaaagggggccacaagtcaaggagaatttgttacactcatgtaactctgaggatcccagtcctggaaaatgtatctcatgggactcagctaaggaagaatagcattgtcctgcccaaaccctccagccacacagtctgagctttcacctccaaaagtttgacaagatttataaagactgaacaacaatcaagagctttccaatagactatctcactagagtctttcctctcacaagtgattccccattatggcccctaccctggttgctctagctagatttggacatgctatgctcctgggtccctcctgaaattgctggtctggtgatgaagaaaggacagtgtcatagtcaaggctagaaaagggatgaccacaatcctatacatgtccataaaagaatactattgctctgcaggatctcatctagagacaacaacctatcaatgggaaggtcaagtactgaaaagtgaggccaacatcactcctgtcccctctgggtttcttcactttggatctaacctgtatccatttgacaaacggctgatttgtagaactgtacaagcagtgactagagtctgggctgtggctttttccttagagaactgagagagaggatctgtgcttagtaggtctgggtctccaagtcccacattaaagactcagaaaggaagagagaaagaaggaaatatatatatatatatatatatatatatatatatatatatatatatatatatatatatatataatgttcttgaatacttggtagaaagggctaccgatctcaggcttcaaagtgaagggacagattcgtagattttaactgacttgtccaaggtctaacagctaaattttgggggacaggatttgaatccaggtgtttctaatttccaattattccatgcaacctctcaaggaagcttcctatataaaacagaatcttccacataggcttgtatcaatgggagtaggcattgcctattgatagcagaggattatcacaccacctgtggctgtgattctgtggataaacaaggcatggacacatcactcctcctctgggccccagtcttagcatctgttaaatgagagcatctcactgaaaaatggctatttagtgtccctgctggtccctgcaggagtgagaatccattatgggaaaaggagaggaaaatgccagatgaaatgctttatctcaggcttagctcttatgaaaagaaggcatatttacaaaagccagcgcccaaacctcttgctgtcactattggaacaatggcgttagtccatcgctgccaccaagcagaacaaaactactggtgacactggcccctcatcctatgcttcattattctggagttcagctttcagcacccactccaagggggttgttttaatgggatcgttagagagtgtttactagattaaaactgtggctgtcttctgcaaagcaactctgcaaatggctttatgggtttctgggtttattttgtctcaatgactcggctcagtttgcaaatcaaatcaaagctgatttttctaactgccactcgggcgcacccagcgggagtctgcagagccagctgtgttcccttgacggctggcgctggagacaagatgggagtgctgctgcctgctggcagccagagtggttccacccaatggaaagaagcaagcatgcaccttcctgaccctaaccaaggctggaggagcaggtcagaggaagcaaatttcattttctgaaaggagaaatggtagacagaatctatttgacttcaaggactgatgggcagaaaaataatagggagccagtttggactcataatgtagaagccctctcaaacggaagtgtccaaagtgtgaagcaagtccatggtgggtagagagatctctatcacagcaggaacagaaacagaggctggctggccttcttgttagtggggactgcagatcccatagtggacactttacctctgtcacttttactcctaccatttaagagaacaatcctgacatgtaacttgcatttgaaaaaaatgaagccatggaagaataatgacctgttagtcatccactcatccatccatccatccatccatccatccatccatccatccatccatttgttcatccaatgcatttcattgagtaccagtatatgctgagatctgggaataataaaacagtgctcaaaataagcacagtctttgcacttacgtcacttagagtctagcagggagatagacattaaacatgtaagtagactatatatatatatatatatatatatatatatatatatatatatatatatatatatatatatttgcaagttgtgatgagtgctatgaaggaaaagtacagggtttagtgagagtggaaaattagggatatacattaaaacagaggtcaggatggtcttctgaggacataaggtttaagaggccatcttaaagatacttctctgttaagatatttatctattaaggagacatatatagtagccaaagcatttcagagagagggcaagatgagcgaaggccccaagcttgggaggagtttgatgtgcctgaaaaactgaaagaagaccagtgtgccagagtgtaataagagaataaaaggatagaagcttagaggaggctggagggaggaagggatcagatcacgcaggcaagactggtggggcaaggcctgtgggtaaggaaaagtagcaaaatgaacagatgagtacaagaaaggagtcacggaagaattagaaagacaggacatcagtgggtaagagaacttggatggaactgggcatcagtttctcaaagggggactgaacaatatagttctagaattgaacaactaggtcagaaacaattttcccttggcctgctctgtctcagccagaggacatgaattgagatacctgggtacctcctttagcagctgcaacctggggcatcttctaccagatgggataatgtacctctcatgggaagggtcattttctctctacttgagcattagcacctctgaagtctaagtccctaccccaagcttccacatgctccattttctaaaggatcaccttaagcacctgtggctgacatcttcaacctgctacctatgttgagcccatccctcatcttccaaaggtatggttctaaatgattcccctgctcacttgccctttctaacatttcctattttaatgataagaacaaaacctgatttttaaattgctcttttttgctctgtggctttctattgtcttcctttcagagtctgaataatagttttaaatccaaaccatcacttaatgcctgtttacccactggctgcagttttctctctatggctctgatcagattgattcccaggtctagagtgtgtcaagcaaagtgctcaaaatgtcttttagcttttatattcaaggaaattcccttgctttttgctaccctaatcaaacatccttattggattaggtggtagtatcctcataaaaaggggaattttgaacacagtcaagcagacaaggagaatgtcatgtgatggtaaggcagtgatcagggtggcgcttccaaaagccaagaaatgccaaagatttgccagcaaaccaccagaagctaagagacacacgtagaaaagattcttcctcacaacactcagaaggaacaaggtctgcagacaccttgatttcagactttggacctccagaactgtgagacaataaatttgtgttatttaagccaaccaatttgtaggactttgttacagcagccacaggaaactaatagaggtccattactttgcaaccgtccaagctgggtggtactaaattagatccagagttactagtagcaacattacacaaaggaaagggttggagacacatgctggagccaggtgtgtgtctaatattcttgtgtaaggggtactaggcttggggtcaagttagaatgatcctgaatgagtgcttagggctgttacaactggcaaccatctggttctgtgggattcatgtagctggtcatagacagtggctggactctccagggtcagggaccagacagcggcaagttgcttcatcaccagagtactggccttgagtctgacatatggacttcagggtctggatgccctccatcagacccatgaagcagctgccgtgatgacagagagagggaagagccttgggagagactggtgacccatctctgggacttcatatgcttccaaagtccgtgggattctcagtatcttcctgtgttaaaaagaatactgttttcaggaaggctgcctagaggaaatttgatccgggtggtcaggaagggatgggataaacagaatattgattcccagctttaggttcttgatacaaactcctcacgggcagtggacggatttataatagatagggtttgcctttaatcaaccctaggtactctaagcatagtaccaggcaccaagtagacactcatcaaacacaggtctgcttccctttgtcctatgctccccaagcatccttcttatctgatgtggtgagaggggataactgaactgtgtccgactgacattctgcactatctagttctctaccccattcccaagtgctactggagcctcatttctttgggtttaagtgttggatctcaccaaattggaaaaccagaatgcggatgctctgatttcccaataccctgacctctcagaagcctgcctgggcttggacagctgggcattcacactcattcatgcattcctatcctttcacacacgcttactttacctgcatacacactccattcacttaaggaaagatggtaacctaaagctcaagcaagaggggaagcccttatgctaaggagaggtagagaactcttctgtctggttctttaaatgtcactgcaattctcttgcacatcagcaaagcaactctagagaagcccagcagggtgggcttctatgtctctgaggactgcagtcctgaagttttcaggagagtatagttttagagattcttccactgtccccatatgttcctattgcttgtcaggtctcatgtttccaattctcagttcagaaattatgacccagccagctaccctctaatagagcttacatcccagagggtgtccttagaatcccacctaccccatggagtgcaaatccattgcatccatctctcctggtctagaaatcgaaagccaccgaggagccatagagcataccatagtgaaggagctttctctgtgagtttccttccctctccagctgcttatttaagcaggctgcagacacctagctctcccgattgctgtctagagccctagtgctacccaattgatggtgttcttccttctacattatctgttttcttcagtggaaaagtctgccaatatctgtgatttgtgtcacttttgtttgcaggccatcaattctccttgcctcacagagagtattttatctctttccatccaggagcctgagttcctgagagggaacaagttagggacatgtcaccctctgtgactcatgtgaaatcatggtgacttcttatcacagggagccctagtgcttccgttttcttcttcctcctgcatcttctcttttgtgcctacatattgggctgattttcttcaaagttataaaagtcatgtgtgatgggtcttggtgcacatttcgtcaagtagctgtagatttttttctctctttttctccccactctgcccgtgtgtgtgtttatgttcctctgtgtggttttgtcgttgtgcatgtgtctatatatttacacacatacacatacatacttgggtcatcgcttttctctgtactttaaatctacggttatatgcctacttacgtttaccacttttatctccttggaagcagtctatgaaactatggatgctgccagtaaattcagggaacagagtagaattgcccagttctgttgtgtgtgtatggggagggtttgctgttaaaaatatcaactctgtaacaaaaagatacatctgatttctaactattcaaccctgtaataggttaaacgatagcaaaccattcattgattttgttttttaaaaagagtaataaacagaaacatgtaccaactgaaagagccaggcaattcaattataattaggaaaacaaaagtgatgagcctgaacaatgctgccttagttttggggataagtgttgaaaatgccaaccacgtaataatgcagcgtttgtcttctcattactaaaggccccagtactaatcacctcatttttgaaagctgtgtaccaacagaacgaagtacagaactcagtagatgggtctaatagacatgcttaaaaaatacccacataaacatagacccaaatataagaaaaacatatatcaaaagaatatttgagtaaatttatatccatcactccactgatcaaagtaccagtccatccttttacaccattcatccacccatccatccattcagtaaatatgttttaaacttttactctattttacgcactgtgctactaatatacaccctagaatgtatgttctagatgcaaatgactccggtgaaaataacaattctttcttgttttgagttactgttgcctaatctttctctgtgtggctagaaagaaatacttaaatggctgaagaacaggtgaagacagacaagcagatgccaacataccttttgtagccagacgaacacagttgattttggtctcctgtgaacaacaaaaatgagatgccaattaattagctgtgagttatataaaattgttatataaagacaaaaatacatatatatttgcatatatattcatgcatatgtatttttaattataattttaaatttgccctttccatttttttccccatcggatgaccttttaattccattttttaatttttttctcaggctaggtacatatgttattcagttcacttcctgactcctaccatctcataaacctcattcccagacagaaccactttataaacatatcagataattcccagcactcatcatctttaacaataacacgtagtgggtacttggggtatgcaatgtgctttgttcagttgcatgagtgagcagatggaaggagggcatccttgggaaactttgttactagcaataatgcatctacatgcatagacgggaagagatacttggcaatagtccagtctatatgaaacatgtcaaactcaaactgcaaagttcatgttcaaaagttacttttcccctgagctcttgtgtgggcctcgcaaccttcataaataatgtgtgtggcaatagaatctttgctaggtgaactatctagttgttgttagctgttgccaaagtaaaaaggattcataaatgtgtgatgttgctgggcacacagtggagttaatgaagagtgtgcttaggaagagaattctctgcccgctttactgggattcatctcccaggaggtcctggaaccagctgaaaattccagttgactaaattatacccccaacaacagtctgaattcagtgtagcaaggaaagtaaaatgcaaagaatgcaagtatgtgagttgctgaaccaaaaatctgtcaatcatccaattcttgtcttgctgcagctcattcacaaagaaccattgcatcttgaagggattggtggcaatcaggataggaaaggttaggaggccataataaaacccctgaacttcagtggctaaaaacagcaaaggtttattttccattcaaactacctgtccaatgtaggtgtgtggctgggtctaaggggtgagattgggggtgattgggagacactctgaccattgtaaccactcagagatcatagctggtatgtccattttaacccaaggggagagagtgctaaagggtaaagcagtatcaatcaaatgctttgaatcagaagcgacactttcacttctatgcgtgctttattggctagaaccagacacatggccatgcctaattttagtgagatggggaaatggaatcctcccatgtatccagaagtagagaagacatgacaatgtctacggcagattctattccatctaggtacacctctgaatgctggaaatgatcacttctattacgtccaagtatgactccccataattaatctcatagttatcgccaatagtcttgattcttttcctcaaaatgcacagaaagtctgcttttgcttgtgtaaaaaagaggtctggataatgaaagatggttctcgggctcataaacattcttctttatcaattcctcatattataagagttcaagtcttttgagctatcctagctgctcattctaggacaaactccactttatcctattaatgtggggtgactagaacacaaaacagcagtctatacatgctcttattgatacatgattatattgatatatgattatctagactatcactattatccttacttatattgggcttctattaacatagctaacatcctggtgtttatccgtctcccccaaccaaaaataaaagtattggttagaagcctgcttctacatgtacaagtgtggctatatttttgaaacccaagtacagagtcatatttaccactacaatttccatcttcttcaactgatccaagtactacaggccatcatcacagtctccacaagctgaaaatttttagaaatcatttttttctttaatttcatccagatcattaatataagtaacaatctggataatgccaatggtagaaccttatgacatgtactagattccttcttccacgttgatattcatctgttaatcagaatcagaactaattgctaatatcctaaactgcttatgaattgagcttgagaataggttcaaattccttttagacactgatactctgtctattgcatttctccaatcagtgcaaagactgtcttaaagaaagaaggttgggttgacatgacttgttcttcggaacaagtgttttcttcttcataaaaactataagtgtctctctttaaaacaaacaattatttcattttataaagtagataatttggaaatgttaaaaaaatgacaagtcatggttcaagtatatgaatcattcatataaaatcttcacacaaaatttgaagcatgttacatttcaataacaaagttttttcagagaacatacccaaaagatgaaaaaaaaaaaaaggaaaatggctgagaaaaaaagtaacagtaaaggacattgctctaaatgtgatgtacaaaaagcttaagttacaagttaaatcttgcatatgacaattaaagtgagcaaactcatttctgttttcatgtttggacaaaggttttcagcttctgttggcttccattccaatagcaccataccctgtgttttggtttaaagagcttgagacggttaaataaagcatgaaacccagaacactgaagaagacatgcaaatgattgtacagtgtcacaatgactatcattgagaaattgtgtagactgggagaggtgccaggagactatagatggttagaatgatcttccacttcatggtaatgcaacaacaacaaaaaaagattttgaaagtaatatattagaaaacttgccagttctgtgcatgatttttgaatagagcagagggcaaaggtttgatgaggctaatactgctgagagtaatttctaaatatgtatcttcactttaaagaaattcagtcttatctgtccagacatctaagaatcttttctcagggaataactttaaatataaatgaagctttatattcaatgatgttggttccagtgttctttataaaagtgaaaatcatgagcgatatatctgtctaaccacacaggcatggcaaagaaagctgtggtctctcttattcaacacagcactgcaagtcctagccagagcaactgggcaagagaaaaatttaagggcatccaaattggaaaaaaaaaagtcaaactgtctctgtctgcacatgacatgatcttatgtatacgaaaaaccaaaaactttaccaaaaaaacactcctagaactgctaagcaaattcagtaaagttgcagaatacaaaatcaacatacaaaaatcagtaatgtttctatacatgaataaactacctaaaaaatacaaaaatcagtactgtttctatacatgaacaataaactacctaaaaaagaaatcaataaggcaatctcatttataataactaccaaaagtaataaaatacctagaaatcaatttaaccaaggaggtaaaagacctctacaagaaaaaccaaaaatactgttgaaagaaattgaagggaaacaaatagaaagatatctcatggtcatggattggaagaattaatattggtaaaataatcagactctccaaagcaatctatagattgaatgtaatctctatcaaaataccaatggcattcattatagaaatagaaagaagtcctaaaatttgtatgaaaactcaaaagaccgcaaatagccaaaacagtcctgagcaaaaagaacaaagctagaggtttcacactaacagactttaaaatatactacaaagctgtaataacaaaaacagcatggtactggcataaaaacagacacataaaccaatgaaataatatttttaaaaacgccaaaattaatgcacatatctacagtcaactgatttttgataaagtcaccaagaacactcactggggaaaggacagtgtcttcaataagtggtgctaagaaaatggatcatccatattcagaagaacgaaactagaccgccacctctcaccctatacaaaaatcaactcaaaatggataagagacataaatgtaaaacttgaaactataaaactactagaagaaaacataagggaaatggtctgaaaccaaacatatgacactgatctaggaaaatattttatgaataagaccttaaacatataggcaaagaaagcaaaaataaacaagtgggattatataaaactaaaaaattatgtacagaaaagtaaacaataaacagagtacaaaggcaacctacaaaatggaaggaaagtatctgcaaactattcatccctcagggaattaatattcacaacatactaggaactcaaacaattcaacagcaaataaaaatccaactaaaaaaatgggcaaatgatcttaacaggcatttctcaaaaggagatatacaaatggccaacaaatatataaaaaatgctcaatatcactaatcatcagggacatgccaattaaaactacaatgaggtatcatctcacccttgttaagatggctattacaaaaaaaataacaaatgctgctgaggatgtgcagaaaagggaactcttatacattgttgatgggaatgtaaactagttcagccactatggagaacagtacagaggttcctcaaaaaaactataaatagaactattatatgatccagcaatcttactactgggcatttatccaaaggaagataaatcaatatattgaggagacatctgcatcatgcttattgcaacactattcacaatagccatgacaggcaatcaaactaggtgtccaaaaccagatgaataaagaaaatgtggtatatatacaacaaggagtactattcagccataaaaagaataaaatccagtcatttgtggcaacataaatggaactagaggacattacattaaggaaaataagcagtaaacagaaagttaaatacttcatgttctcactcatatgcagaaactaaaataagttgatctcatagaggtaaaaagcaggaagcagatactagaggttaggaagtggagagagagaaagggaaagatttgttgaaggatacaagattatacctagatagaaggaataagttctagtgttctgtagccctgtaggatgactatagttaagcaaaatatatagtttcaaatagctagacagaggatactgaatgttcccaacacaaagaaatggtaaatattcaaaatgatgaatatgctaattaccttgatctgatcactattcattatatgtctcaaaacatcactatgtatcccataaatatttacaattagtatacgttaaaaacataaaaagaaaaaattccaaaaggaaaactggggtctatctacatagtagaatattatggagctgttaacaaaaatgattgtgagggccatgtaataacatgggatgatacacataagagaatattaaataaataaagcaaagtacatttttttgttacaacatgcaaatttaagcatttaaaaaatacatcctgaaggaaacagactaaatcttaataattcttgcacaattaatttgaagtgcaatatacatgcagatgagtatactaaacttaaatacagtttgacaaatttttcaccaagtaaacacacacctatgaccagcacccagatcaaaacactcaacattgccagcacctcagaagtttccctcatgcttcttctggtcacttcttctctgcaaatgtgaacattaatttgctttctgtgggaatattctcttaaaatgtggtcacaataaagggaattctgcagagtttttttgttttgttttgttttgttttgttttaagattcagagggttggtgtgcaggtttgttacatgaatatattatggaatgctgaggttagggcttctattgaacccatcacccaaagagtgaacaaatgaacatagtacccaatatgtagtttttcagcccttgcctctctccctctttccccacttgtggagtccccaatgtctattgtttccatctttatgtccatgtgtacccaatgtttagctctcacttacaagacagaacatgtggcatttgattttctctttctgcactaattttcttaggataatggcttccaggtacatccatgttgctgcagaggacatggttttattcttttttatggctgcatagtattccatggagtatatgaaccatgttttctttatccaacccaccactaacgggcacctaggttgattccatgtctttgctattgtgaatagttctgtgatagacatacaagtgcatgtctccttttgttagaatggttacttttcttttgggtatgtacccagtaatgggatttctgggtcaaatggtggttatgtttttagttctttaagaagtctccaaactgctttccacagggacagaagtaaagccacacacctacaaccaactgatcttcaacaaagatgaaaaaaataaacaatggagaaaggacacccgattcaaaaaacgatgctgggaaaaccaggtaaccatatgcagaagaatgaaactggatcactacctctcaccatataaaaattaattcaaaatggattaaagacttaaatgtaagacctcaaactataaaaatcctagaagaaaacctacgaaatactctcctgggcattggcctaagcaaataatttatgactgagacctcaaaagcaaatgcaacacaaacgaaaattgactattggaacctaattaactgaagagcttctgcacagcaaaagaaaaacaaaaacaaaactatcaacagagtaaacctacagaataggagaaaatatttgtaaactatgcatctgacagtggactagtatccagaatctgtaagaaactttaacaaatcagcaagaaaaaaaaacaaatagccccattaaaaagtgggcaaaggacacaaacagacatttctcaaaagaagacgtataagtggccaacaaacatgaaaaaatgctcagcattgttaatcatcggagaaatgcaaatcaaaacaagatactgtctcataccagtcagaatggctattattaaaaagtcaaaaaaataacagatgttggcaaggttgcagagaaaggggaatactctgttgatgatattgtaaattagtgcagtggtttattctatcttctcttgtacattgtgtcatttgtgagaagtttttaactttccttaatcttcccttccacagtttcgtgcaggaaaatgagccatttcctaaaatcaccccttcagcaccacacgttttaaagtctgttttctatgatctagagtgtatatacgattatgcttaagtcttcctgactgacaaacgtgatgccaaaacgtttgttttctcctaagttcctaacaactttaattccataaccaatttgtctctgttggtcagaattaggtacagaataacaaagccctaagtcactctcttgaccttctgagtgactagattgtcagcaagcaaatcaggtatattctggatactctgatatttatcagaggagaggtgtggccagtgtgcctatgtccaaagtgcccagtcttttcaacaaaaagaaatgagcactttctttgttctcggattatataagtctctggggaatggaaaaaaaagctgtattttctatttgatctctactataccctaattccaggtttgtaatatattctgggacagtacaatataatttcatttccttatcattttaatctcacccatgctccacttcccactccagattaaaatctgcatgcaggtataaatcaccctggggtagaacaccgtgtccttactgttgtgctctgttgagaaatgcttctactcaaggctcggccagtgcagcaatattgggtaactctctgtccctttctgtggctcaatttccccatcaatcaaatgatggagaatggggtagaaaaggccactttggtagaataggcaggccactctaccaaggttgcttccagtcctcaatgctgcgtctggttttagctactggcagtactcctttactttcagtactcagtcttcttgatactacttcctaatacctcatttcatgcaaataattttatttatttatttatttatttattttggtaggctgttacctaccttattactcaaaatgcctcatatctgtatctacttatagcctccattttaacactaggtcaagtctgactcatctaaccatccatccatccatccttcaattatttactgaaattttaggatgcctcttcaattgaggagttcacagtggaactgtttaggtcatcaaatgtctcatagctgctgtttatcatccagaaagacttgggttaggctgctaacctgatcaagaagccctaggtacctggctaatacatacaattcttactttactgctctattagactcctcatttaataggatgtagatttaaccctgatcccatagttttcaaatagttttcacattatcccaacttgtgtctttattttgtctaagactgagcttcccagttgatatgatggaatttagacctgacctcagcgtctttccatagtttccccagtaactttgactcaggccttaattctcctctaagactgtgctgagatcctgaaagtctacctaatttttgttcatgtactcatttggtcaactgctcaacagatatttattgaatgattactatgtgccacacattgggctaggtactggagctacaaatacgaccaaagtagacatggtccctgtcctcatagagcatgcagacctggggagagacaaacattagacaaccattctcacaaacaagtatctaattaaaagttgcaataaacactgggagatatgcaataaacacacataggtatgtatttacttggtgaaaaatttgtcaatctatatttaagtttagtacagtaaactaaatgaggttgtgtttaaaagtttagtacactaaagtaagtgagaagtgccaggtgctgtgcatgtgtaagggagatggcatggggtgtgggtgggaagggagatggtctgctgcttttagaaagaccatttaaccttagaagttagacacaggaagcatcaggaaggtcatcccagactcagacacagacatgcaaaggcctgaaagtgggaaaatgcatggtgctgttgaagacatacaaaattctggcatggctatcatcataatgaattacctgaggcatgatgtaaaacgaagctagcgacataagaccaggagaccttttgggactatagagttttggtctatattttaagaacaacaggaagtcattaaagagctatttaggcaggaagaattgaaatttcaggtttaaaatttttaaaggtagaggctgttacatagagaatagacttacggtgcaagagaaacaagttggtgagaagaaggtggtggtatagtcgaatgatgagatggtggtgccttagaccagaagagtggctgcagtgatcctacctcaacctttccctacctttggaaagcatatttttgctctgtttgactctagagctccctcccaccatcccaccccacctcacgcatacggatcagcctgggcttatggtattgacagcgttgggtccttagtctagccttcccacaaactgactctccttgactttcttccattgcactgacccttaagctattgtttagccccaatgggactcactcacttaacatgtttgttacctgaaagaagcactaagaatttttttttttttttaaaagatgtcctcttttcttttttctttttgaaacagagttttgctctttttgcccaggctggagtgcaatggctcaatcttggctcattgcaacctctgcctcttgggttccagtgattctcttgtctcatacctacttagcatagtttatgtcttttaatccttataacaagactgtgaggtggatacgacaatgtccatttttttctcacaagattaaataacatttttcaaggttacacgtataataagccaggctaaaatacaaagtaaacttcaagcaagtggccttcttttctgaggtgtctgtaaggcaaatacccctttgtcattgaggtcagatgctatgctttcttgggttgcaggcaggcacacaaagacaatggggcacagctttctttggaaaacaggctaagtggtttgtgatattacaaaattctgtttgacttgacgcaggaccttgaacaatcagataagatctggaatccttgagtaactcagaaccattaggactacgtaatgtggtagcctcctcctcaaaggataatgcatgaggaatgcctttaaaggggtaacagaagcagtggggcacttgagtgctagctcactagaaagcacgtatgctggattctgcagaccctcagtaaccaacagtgagtggcaaggtgcagcctcaggttgcaggataggtggctattggttacagacacttctaactggacaaatgttcactatcaactttatgagatcttcctggaaggcattaggctccacttgaggcaatagccaaggccatgagccatactctaagaaaggaagcccccaagtagcatgcaagccattcggaaaatttaaaatcaaacccaacctctgaaaatcttcttgtaagttttatctctacttgctgactccattgcctcaactctccaagtctctggaactcccttcagtgagactacactaagtccactaagacttttatatggtcagcactcatagtcactgctacaactccatcttccttaatctctcatcaacattagctgcaactgaccattccctccttgacctgtttaattatcttggctttaagtcattctaccttccagacttttctcctacttcactacctgttctttatccctttctttgcctatgtatttatcctttacttgacttcaacacactggagtgacctggagcttggttttatatcctctttcatcatttgtatcctaacttttttaggagattataataaattgcaaggatttgaatattatgttctcatgactcccaaagtactttttctagcattgatattcctgagatccaggctcatctatccatctgtctacctgaaatactcacaatcaaatatacaatcatctaaaagaattgttttctcttttattttcactccaagccttactcaccactaattttccatgtttaaataaatgtcaccatcatctacttagttgattaagcaaacaacctaggagtcattattgatttttctagatatgtgacttcccacagtcaatcaaccattaattcatgttggatctgggtagttgaagaaattggtaactatttaacaccaaattttcccacatatgattcaaaaacaacacaggaaaagaagaaaaaaataaaattgtacaaaatccacaatttcagcataattaatgtatagagaagtcttaaaatgtcataggcctgtttggtacaaaaagaagaaccagatataaatgaaatatctctaaagctttcaacacaatcacccttgtcatcctatgtggagaacaagagctatgtaaaaacaatttggaagagaaaagaggtaagctagcagagagtacatggctgatctaaaatacgttccagaaagacaaagaccacactacacatgaaagtgctaaaacaattcctggtagatcaaaactaagagtacaggaaaaggacttgaaagaacatgtgactcaaggtggtagtgttcaacaggtgaaataggttcaatgggtgaaaatgagataaaaagaagggagaagtactcttggaagattggagattgaaggaaaaaaggaagcaaagtgggaatttttagaatcacaaaagctagaataaaaacaaaaagtcagaacctacacccattccctatgacatacacacaaaatcatcgactgaaaaaaatacctgtactttactatccagtcagaacaaactgtttctgaactgagaatcgtataagccactttaaatctaaaaaattttttaaaatttgaaagagcctaataaagctactagatgaagaaaacagaaaatgtcaaaacaccacaaatgatgaaaatctacccctaacaagaaaacagtctagaagtaatattacaaactgaattaaatatcctcaaacaactttgacttacagaagcacaagtgaaaaaccaaaatatacaaaagatcaggaaaaaataaaaagaaagttgatttaactcaggagagaaatttttaaaagatcacctcagaaatgaagattaaattaccagatgtcaaaaacagcaatttaataaggggcactaaagaaagacagaaacccaacaaagacaacagaaatgagatatagaaaaaattaacaaggattggtgaaaaagtggtttaaaagtaaggcaaagaaaatccaacatatatatagtgaaatttctgagcagagagacaaaataggtaggtaaatattttatgacaataacccaagaaaaattattggaagtaaaagaagtcccaagcctctatactgaaagagtgcacagtaccctggggaaaatgcacctgaaaagatcaactccaagacacagcctagtaaactattaaacttagaataaatactctcaaagccaaagagattgaataatgtacacatgcaagagaattagactatcatgatacttctcaaaaacagcatgcaaagcaagaaaacaatgtggcagcattttccaaaagctcagagaaagtattaatattaaccaaggacttcatagctagccatgtgtttttcatatagcaaagctatggaaaagtagctttcaacattcaaaaagccagggcatgctgtacttgtctttcttgaaggatctacagaagataagttcatccaaaaaatacgactgaggaaacttcagcaaaaggactgatgggtaaaagtttaatatgtttaactgtaaatctaagactgaaataaggtaggggttggatgaaagtaggatatataaatgttatgttttctgtcattgcagaaataatacaactaaaaattgagagagagagagagagaaagaggaagaaatagggaaagagaagagtagtattaggtcatttattgttgtacaggcagtgctatggtctggctttgtgtctccacccaaatctcatcttgaattgtaatccccatgtgttgggggagggaccttgtgggaggtgattggatcataggggtggttcccacatgctattcttgtcatagtgagttttcatgagatcagatggttttataaggggctctagttcctttgcttcgcacgtctctcttctgccaccttgtgaaggacatgtttgcttctccttccgccatgactgtaagtttcctgaggcctccccagccatgtggaactgtgagtcaaacaaatatcttttctttataaattacccagtctcaggtaatatctttatagcagtgtgagaacgaactaatataggcaatatgtgaaagttaatggataccagaaaaatctgacaaaccagatagcaaaagattaaacaagaaaagatgggattaagagtgctaaataggccaggtgccctggcttacgcctgtaatcccagcactttgggaggctgaggcaagcaaatcatgaggtcaggagttcgagaccagcccgaccaacacagtgaaaccccgtctttactaaaaatacaaatataagctgggtgtggtggcacgtgcctgtaatcccagctactcaggaagctaaggcaggagaattgcttgaacctgggaggcacggtttgcagtgagctgagatcacaccactgcactccagcctgggtaacacagcgagactctgtctcaaaaaaaaaaaaaaagtgttaaataatataaaagaacaaaggtaactactagaacagaaatacaagacttcctaaataccaaatgaaattttaaaataaaagagtaaagaaagcacaccagaaagtattataaaattaatatagtaaattatgacataaaaatatatggcagagttgagatatctcagtcatatcaccaaatgttaatgatttaactcaagtactgaaatgtagaagatattcatttggattacaagacaagacccaactaccttctatgtataaaagtcacatctaaaacattgttattgtaaacagtgctacaacaaacatagtcaataataatttatttgtacattttaaaataacagagtgtaactggattgtttgtaactcaaaggataaatgcttgaggggatggataccccattctcaatgatgtacttatttcatatcacatgcctgtatcaaaatgtctcatttaccccataaacaaagaaatatataaatatatcctactatgtaccctcaaaaatacaaatttaaaaaatttcaaaaaaaggtgaacaaaataattttcttcagaaaagtaaaaaggaaggaatgaaataagctataaacagtaaatgaaaaaataataaagatatagtagtgatcctgatataaaacaagaattcaactaaaaaagtattacacatggcaaaggatactttttattgctaaaatccacagctaacaaagaatataataggtataaacatctatgcccccaaaaacataatgtatttacaaagtcaatagtagtcatatataaaaccaatactcagaggacataagggtagcaaaaccccattacaatggcaacaaagatgaaatacttgctaatagcaagaacacacaaaacctgtataaagaaaactttacagcacccatgaaagataatgtagactcgaacaaatagaaagacatcccttatctcaggtaagataattcaacatcttaaagatgtcatttcactctaattaatgtataaatttaatgcaatcccagaattactaatagactttttatgaatctggacaagtggacactaaaatttatagggaacatgcaagaagagctagaaactcactgaaaaaggaaatctcgatggggaactttccctcgcagacattaaagtttagatcccataattataacagtgtggggctgctgcgtaaatagccacatagactggtgggatagaatacgacatccagaaaaacacccaagaacatatgaaaatttaaaatatgagaaaagcagcatctcaaattatcgggacaaaaatggacttttaaatacatgttgctaagacaactagacagacatttgggaaaacagataaaaattagatccataatttacatcacacacaaaaacaaagaccaaacatcagaaaactaaatataaaaatactaaaatacataagacttagaagcaaacatgggtaaattcctttatagcctgagtgtaagaaaaaactttttaactgtgattcaaagtttaaatgtaataaaagaaaaaaaatgattcatctgacaacattttatttgctgtggcaaaaatataagcaaagtcaacagataaatcacaaactggaaaaaactgcaacatatatcacagataaagtactgatatctctgatatataaataactttaaaaattgatagaaaaagtaaaaaacaaactgaaaattgagcaaaagacataaacaggtaattcaaaaattacataaaaatggctattaagtataggagaatatagcaatttcacttataagaaaaaggaaattaaagctatattgagatataatttcttacatgtaagtgtgacaaaaatgaaagttagaccacacaaactgtttacaaggcagtgaggaaacagtcatacattgctgggacaaatgcaagttggttttacccttaaggaaggaaatttagtgacatctagcaaaactgtgtattagtccaccctttaatcctacaattcctcttctaggaattcactctgaagacgcaccttcaacaatacaaaaatatatgtgcacaagttccttgatgcagcaacatttgcaactgaaagatattgaaaacaatatagccacacatgagagtggccaaataaacagctataatcacataatagagtactgtgccgggcgcggtggctcacgcctgtaatcccagcactttgggaggctgaggcgggctgatcatgaggtcaggagatagagaccatcctggccaacatggttaaaccctgtctctactaaaaatacaaaaattagctgggcatggtggtgggtgcctttaatcccagccacttgagaggctgagccaggagaatggctggaacccaggagggggaggttgcagttgagccaagatcatgccactgcactctagcctggtgacacagcaagactctgtctcaaaaaaacaaaacaaaacaaaacaaagagtactgtgcagctgtaaaaaaaaaataaggaagacatttatgaaataatataaagtgatacccaagtatctatagtatgttagcttttctataagaaggggaaatataacatacattgacttcaaaattttcacaaaaaaaaaccgccaagaaattaatgacattggtttccaacaggggatggtagaggtgatgtaaaagaagtgatatgtgcttttctgtatgcacttgtttgtacagctaggcttttagaaccacgttataatgtttttagaaccacgttataatgttttacatattaagaaatcaacagggatgggcaaaatgaaactaaaattaaaaacaaagagtcataaacaaacctaacttaatttccaataaatacataaccatattctagtgaaagaaaaaaaataaaccaaataattttcaacacaacggtttgcatatatttagactgaagagagaacagaaaatatatattgaaccctagttagtaggtttgttttgctaagattaatatttctggaaatacttcttgagtattctatgttgaacaataagtaaatatatgaataataatgaagttaagcttctcactgtcagagaagggaattacagaaatgggaagagtgaaggctggaataaactccttgatgttggactagaatggaggtatcatgaacttttgcctttttttttttttttttttttttgagacacagtttcactctcgttgcccaggctggagtgcagtggcgctatctcatctcactgcagcctccgccttctggtttcaagcgattctcctgcctcagcctcccgagtagctgggactacaggcatgcaccaccacgcccagctaattttttgtatttttagtagagatggggtttcaccatgttggccaaaatggtctcgatctcttgacctcatgatccatttgcctcagtctcccaaagtgctgggattacaggcgtgagccaccgcacccggccacttttgccttttatgatagatagctaaaggctgggtgtggcggctcatgcctgtaatcccaacactttgggaggctgaggcaggtggatcacctgaggtcaggtgtttgagaccagcctggccaacatggtgaaaccccgtctctactaaaaataaaaaaattagctgggcatgatggccggtgcctgtaatcccagctactcaggaggctgaggcaggagaatcacttgaacctgggaggcagaggttgtagtgagccaagatcacgccattgtactccggcctgggcaaaagagcaaaactccgtctcaaaaaaaaaaaaaaaaaaaaaaatagacagaaagatagatggatagacaggtagagggatacatagacaaagagcctagaatcagtggtactcactaacaatgattcccactcgttcccaggtctgagtttctataataagtaccattccccatttaaaggaaccagagctggggcaaaggaagcacaagattctgtcagaaagaaaataagttttcaagaactgctggagacatttcagaatgacaaaagaaccatcttgaaggggctcacactagctaattctgggacaatttgagcataaaagtaaatgatgatagtactgaagtataaccaactgaataaaagaagaatctataaatttttatcaatataaataaattaatacattgaaaataggggagaaaggagaactcatcctcggaatagatgtccactaataaatgtggaacaaatgatggaattagaaaattgtcatttggcaaacatctttttatttgtattattattattattattattatttattattattatactttaagttttagggtacatggatgaaattggaaatcatcattctcagtaaaatatcgcaagaacaaaaaaccaaacaccgcatattctcacttataggtgggaattgaacaatgagaacacatggacacaggaaggggaacatcacactctggggtctgttgttgggtggggggaagggggagggatagcattgggagatatacctaatggcaaacatctttgtaatagttgatttcaacaaaaaatatcagcaaatgctaaaagatgaaagtttgaagaagattttacatagtctagaaatatgtgtgtacaaaacacttatatattacaaagaaatagtagctttatagtggagaaaaccttaatggacaacagtttaagtaatcaaagttaatgtcaccagtaatggaacaaactgatatcatgtgccacctagtatgacacattgagaaggaagcaacatcacttttgtggtattcctgacaaaaatgcataacttgaatctaatcttgagaaaacctcagacaaacccaacttgagggacattctaaaaaataactggtctgtaatttttaagagtcaagggcataaaagtcaaggcaagacagatatgagaactctaaagggacctgacaactaaaggcaacatgtgaccctggaccaggtttttttttgttattgtttaaatttactaaaaagtatatgactgagacaattggcaaaactgaggctagtagtattatgtggacattaatttcctggtaattgtattgtagttatgttggaaattgcgcattaaagcatttaggagtaaaggggtgatttatagacagatagatagacaaacagacaaataggggaagaagagaaagaacaggagagggagagagagaaaatgggatggtaaatctattgtggtaaactgttagcaattagggaatctgtatagagagcttattaacattctttacactattcttgaaacatctctgtgcatttgaaactaccttgaaaaaaaggagttagacatattggtggaagagaaagtaagttggaacaaaaacaaatttgacgatgggttgatgatcattgttgaagctgagtgacgggcacatacagatcagtctgttatcatcttgacttttgtatgtgtgaaacgtttcttagctaacaacgtgtgttttaaaggtgagaacaatacatatggagtatgtcatcaataaaaaattgagacattcaaattttgtttttcccaacatgagtgacattgggtacattccttattttttttgacttacagtgttctcatctgtagaatgggagcaataccctctgtacaactctctagggtaaacaaaattttgtgagcacaagtgccttaaggatgcaaatatatatgcatgactttatgattctaataaattgatattgagattataggcaagacaatttttttttcttttccctgttttcaacagaataaatgccaagtattttagcatggcatacaaagcccagcattatttgatatctgcctctctctgggcttcattccatatcccggaaccaacaccgggattgtcttcccaaatgtatcagggaatccccaattttggggcttctgctcaggtgcttcctttgcaaaacatacactttcctctgccccactgtctacctggaaaatatccacttaccttctaatagccaagtcaaatgtcacttcttctacaagattttcctaggcacctcctcatcccctctacctccaggtttatagctgaacacaccaggtattctgccactgggattgctgataatttattgcccacatttgtcttcatggctgtcttctccactggattgtgggttcgctgagggcaggaactgtaacttatttatctgtattcccaactgactcacaacaagcccataataaataattggtgggtttttggggttttatcatcatcattcatatctccttacagaggagctcatgaccaatgaaggcacaattctgcagagtaaacaaatgcaaatggggtgtgggagactgggtttaagccatggctctgatcttgagcaaataacttccccatactggacttcagtttccttttatctgctgaaagaagagaactggacaatcaataagctcccttccaatactgcattttatacttcccattcctcaacaataggactttgaggctgtgtacaaactatcccctaattgagaagttggaaatgtagtttctctgcacctcatgaagagggacttagactttctattaggagctggcaaccccctggtttaaaccaacccaaaccagagcagtccttcatgcttccctgcgcagctcttatctgaccttaatgattcctgctctgtaagagatccattgagctgtaattactaattgatgtttgtaaagtctttgaaattctcaggtgacagatgtaatcaaaggccaatttattatgataattgttattagtacagctcctcactatttgttgatgttaatggcagggccagcaggtgtttcaagattgactgagggacttaggctggccatgtttggcgggaggaaaagaaaaatatgagtgcataagggatttgggaccctcctggttctagtgcacccatattcctctatgaagctatcttgtgggactagggctcggcatgaaacggagcagtaaatgcataggacttttaactgcatttttcacatgcacagattcaaccccagctcgttctcttgtttctggagtatgcttcagcaaatcatagcctctcacagccttggcttgcttgtgtgttaaatgagaatacatatagtgccaatttacacttgctgtgattcgagaatctgtttgagacaagcaatcgtggatgtgggaagaagcgttaggagactgttgaggttgtccaggcagaagatgttactatccagaactacgatggtggcactggagatgagaaaagtgcatggattagagagagcttcagagtgtagaacaaagagaacttggtgatggctgaatatagaaggtgatgtatagcaggaaacccagactttgctgataggaaagatgcaggaataactttgaaggagatgaatgaatcattgcctactattttcatcagtgtcttgtacatatggttcatgtcaatctcttcaactgtgtagcccaataaattgcatttatgggtttgcaaacttgaggaccatgatgtaaaagatgacacttgatgaaaattcagcctctaggaggaaagggactgcagaagaattgtcccacttctccacttgcctctccgtaagtacgacattcccaaacttcctttgacatctcaatccctctctttctttcaggcagccagtgtgtcagctgccgtctctggaaaccctggacttcactaatttttttcctcctcctgaattccctgatcccacgtcatgttcatactctattcaaatttgatccatgggtttaaaaactctgcccctgtggattctgcttgttctttcctgagtgtacctctatgctctatcccacctgtgatatgtaatagcaatatctgacattaattggatgtttattgcatgccaagccccgtgataagtgttttattcatcttattatttaatatttagaaacattcttataaagttgatactatgggtgttaatgttttccaaaagaagaagagactcagagagcctaagtcacttgcctaaggtcatgtagctggtcagtgacaatctatgcaacaggaaagaccccatgctagacatattaatcaaaaatgctgaggtgaaacaaacttggaaattcactaatcttatttaatagcattaatgccattttatagtgcaagaaatagaatccgtgagtgcaaatgtctccattaactttttatattttaacctcagatttcataggattgatataagagggactaattgagtgtttgagcaaaaatgttctgatgacattgaccagcatcaactcagggcttcttatacaaggatatatgtgataaatcaccctcttagtgtctttcatgaaaaatatgtatgcttccttcaagtaagagaagctatgcaaacctgccacctgctctttttttccttggcttcgaggaagctcaggagatacagatagtgtaccctgcgctaaccacctatactaggcctctggtgcaatgattactctttattccactataagattcttagactaatttaaactttttattctagggcctggtgcagtggctcctgcttgtaatcccagcactttgggaggctgaggcaggaggattgcttgaggtcagcagttcgagaccagcttggtcaacatggtgaaaacccatctctgctaaaaatacaaaaattagccaggcatgttgatgcatgcctgtagtcccagctacttgggaggctgaggcaggagaatcactcgaacctgggaggcaggttgtagtgagctgagatcatgccactgcaatctagcctgggcaacagagtgtgactctgtctcaaaaaataaaataaaagtaaaaaaaaaaaattttaattgaacatgtatacatacatactcatatatacacatacatctatatatatgcatgctaaaatatttatgtgtatatgcacatatgctgaattcttgttctgtatataaatttcataaaatttacagttaaaaatttagattcacatacccaagtgtttccaccaaagatacttcaaagttttccaataactgaattgagtatcagttttaacatgtgtgtgcacgtgtgtgtgtgcgtgtatgtgtgtgtgtgtgttttagcaagtatacctttacctgaaaggtcctttgcaaagagttatcacgcctaccatttacttgttacaaaggtcctagtgagcttgaaggacacatctcatccctgtttgacagaggggaaactgaggtttggcaggcaagtattctgtctatggagctaagaaacggaaaagccagttctaaaacccatggataccatttccaaattcagaagtttctctactttttcaccatctgagggcaatcagtccaagcttcacgaggttccttacattgtaggggcctgatggaggcagagatgctgctatatagaaactgaggctgctatttccatgaactttgttgggactggagtctggagcatttatccctgaaggcccaggctgacaagattatcagctgtcaacatttgggtaaccttcatctccctttccaaatgaatttaaagtatatttgcatgggaaggaaaatgttcctgctccctcaggtctcataccatgataataaaatctgtagaaactgtaagtggatgaaaaaataaattagcaacctgggagagctcatcttggtatctgtacaaggtgacacttggggaatttctatcttacctaaggagagaagtctgggccccaacagagctccagcaggggtttagagttttaaggctcaaacaatggaatggaggcctggaagcagggatgcccaagtgagtgggtaagccccaggagatggagtccactgaggactgggaaagagttctaggcagataaatggggcatggaacctaggctctggtgacagacaagagctgtgagtggatgtttacccgattgagattttcctaaggagtaatggaaaggttgtgatgataatcctggaatcaaagtgtctagttcagtcttcctctccacttcaacagggctctgcagagctaataaaatccaggaatcgattccttacatagactatagtgacaagtcagcaaacggttacgtgggggcctctgggtcacagctctctgttgccttggctcagctaccgatgggtggtacaggtctaaggtctgctgagttatagaagcattggaagaccgttgcttttcagggtggaacaggagcacattgagtttcaggcatttctttaccattcctccatggaggtaaaggggaaaagctgttactaaaatccctccttcagtgtgaagtaactgagaccccatgggattccaggagcctctaggtgttcgtccatctactgaaaaaatgtagtcactttgtgagaccaatcaaggaagcagcataggtgaaagcaccttgcttaatatctgagacacagcagatgctcaagcaattgaaattcctcaggatttgtggtatgaactgcccaggtgcttcaggagcaagtctgggtattataagaatatgaaggggaggcttagtcatcatggaaaattgtggtagtcattggggaagttctcaaatattccagttctcctaggcatatagaaggcactgccttattctttctgaaattaagtgtggccatgtggttagccttggccagtggaatgtgaaaatgctatgcaccactttgtatggaaacttgtagaacgaatgctctatttgccacatttttctttctcagacttggtggtggtgtcaagatggacattctgttggcctgagtctctgcctgcaacaagcagagaccctctgctgacccatttcaaatatatagcagaagtgatccagtgagattttgttgttgttactacagaataatttagcttatcttaaccaatataggagttttcaaataaacttcctgatggggtatccaagacccaaactgccatgtgatctcctgatgatcttaactcgaaccctctagagcttatatctacagcttctcattccatgtctatctgaggttttcataaggacatgcgaacagtcactgaactaacacgagaaataagaaatggggtagaaagggcaatatcataaccaaaagataagatcaattgtgccaaaagactcaacaggaacagatatcaggcttgaaactgtcagagacctttgaaccagagcaactccatcttgaataggggctgggtaaaataaggctgagacctactgggctgtattctcaggaggttaggcattctaagtcacaggaagaaacaggaggttggcatgagatacaggtcatgaagatgttgttgatgaaacaggttgcagtaaagaagccggccaaatcccaccaaaagcaagatggtgacaaaagtgacggctggtcattctcctgctcattatatgcgaattataatgcatcagcatgctaaaagccacttctaccggcaccatgacagtttataagtgctatgacaacatcaagaagttagcctatatgttctgaaagtgggaggaaccctcagttccgggaattgcccacccctttcccagaaaactcatgaataatccacccctttttttttagcatatcattaagaaataaccacaaaaatggccaaccagcagctcatactgctgctctgtctatggagcagccattattttattccttaactttcctaataaacttgcgtggacttgcctagaattctttcttccacaagaaccaagaatcctctcttggggtctggatccggacccctttccagtgacaaaaccatgtatgagaagttaaactaagaggaatacagcctggggtgagtcatgggtgagtcaaggcggtcatcagctgggacacagacacaagtcctaaagtcctccaaagttaggaaggtgtgtgcttctatgtggagtttactggacaaatcggtatatgccaggtaaggatgctccaaccctcttccccctcagaagaggagcctctggaaagcagccaaaagaaaaaagaacaaatagtccaactgtaatgcgataagatactttaatatacattgtctaatttactctctcccgatttttttgaggcagatcattaatcatattttccatcttgagatgttaagtaaactgttcaagttcacatagctgagagcagccaaaattcaaagccaagtctgtctgatgctcaactctcagttctttccactctatcatgccacagaaaacccatccatgtgcaaccatttctttaacagtggttggacacaagtgaatataatttctcccaattcattcagagacacagaattttccctaacctagctctacctagataatccccactattataacgtgattatactgcaagcatcatgaccaattcaacacagcatctggtttccaagtgctctcaagaggcaattgagttcaagaactggaggaggaagtaggagagagagaacaatcaccctgctacttcccacttctcttatttagcttagcatttggcagaggcatcatccaggttaaatgtacccctacatgatggaaaggatatgacaagaaaagacttttatcctctgcataaatagaacatgcataacagcattgcccaacaaaaggtggcttctgatggatatttgcatgagtttgccacacttgttttgcatccaaccgttaattatggtcctttcaacttcacaattacggctaatggtggtgaggatgcagagaacagtagattcagcagacctcattctgggaagagtgtgaaacaaacaatgcgaaactgcacccacccgctgtttagaactgagacagctaccctgggtaccatttggaggatttggaggaaatcaaggctgcccaggagcctggagcttgggaaatgagacatctggggaaaaaaatcttactactatgatggagaaaaaaggtcctttaggactcttttatctatggtgaaaatggctcaaacaacatctctcattctacgctgaatggaaattcagactgtactgacacctacttggtgcttttcattattcaatatctttttcttatttaatcctcaaacagactgtgtgaagtatatattactatttcaatttataagtgaggaaacagattcatagacaacaagaaacagttcatagtctcattctttcattaatccatcaaatgattattaggtgtctattatgtgttaaatagtacactcagcatggaggatatagcagctaaaaaaacaaaaaacccaaacacaccaaccacaattcatcactcttggagctctcagcatgctgtgggaggcatgcagtacccaacaacatgtgcaaataaaatacatatatatctagtgtaatatagaaagatagtgggttaacatatgagtgagtgctggtgggtggttcttaggtaatatggttggactcttctctggagatgtgagattgaaactcaggcctgaaaaatgagaaggtactagctctgcaaacagtgaagaaaagacagatgtaggtaaaatgcaccctgaattaagaccccaaagtgaaaaacatgttggaatgtttgagaaataatgtcttaggaaaggttcaagacacgaggcttagttaaaatctagcaggcatgtctgaaccatatctgaagaacagtgataggttctgggcaactctttttgaggagaacatgatggggaaaatgagcctatcagagaaaagggtaagtaggatgaaggatacccagaaattatgccatgtgaaaaataaaagaagtaatagcatgttaattatcaatgagaaataacttgagtggccagaggagggtagttggtactgtcttattttctctgaaaggctaacaaaggaaagaacgttttgatttgttcaaaccaatacaagtggctacaaggggagagtcaaggagacagaatttagctctatatgggaaaaaagctttaacaattttacctgctccacaaaggaatcaactccctttcactccagcaatttgcattgatcaagctgaagcaatacaatgtgttgctaagaatgctttattggagattttttttttggcttctcgtctagactagatgacacttcaaagtccttcctactctatgatgctatagttctataatattgctatatccaaaacaaatggttacaacatggtctaattcataagagacaggtgttgtgaattaggcaccaaagacagtgtgccaggacaaatgggactacatttttatctgtaagaaggcatcaatggataaatgtgagattactaattggaacaaaattcccaacacaagtgcctgtgaacaactcttgtgtcatgaaaatgcctgcaagaaccctgagcaacatatcttatagtgcatgccacacttgaactctgcatggtgttcacatggctggattaaaatacttcatattcacagatcaacaaagagtctataaaatgtctttatcctcatgctgataatagtaaacatttaatgactgacttccacattcctaatgtgaaacctaaggattcattattcgatacattatttcacttatttatttttgttctctcccccactagaatgaaaacacgatgagatcagggatctttgcttgactcactgctgcattctcagcactcagaaaaatgccttttttgacatattgcatgtgcttgacagatgtttccttaattaatccatcatatctaattattttagtagtttactgaaagtcacacagctactagggttttgtacctaggcagtctgatagtaaaggttgaattcatagccactctgttaacctgacaaaccatccttaacatccatagaacaaagatgtccagacctcagaattctcctacccttccttgactaaaacttgcaggtagagtagggagcaatgaaatttgctgatagtaaattattccacctggctcacaaccatcctgcaacaaatgcccatttctgctttcctttcacttgaggttaatataactctatctcatcctttgtctttaatcttttagtgacagaaatatgggtaattctgatttttctttgacctaagctgttttctttctctttcacaatggagcaaaacaacacttttttacccccccgtcaccccatatcaaatctagtgctttcatcttctggctttttttatagttttgattttcatgtttacttatagttttctttattttcttcatttttcttcgttgactgttgtttctcagctttttaagtatagattggagagctgactttgtttaaaagaactatactttttagtattctcagtatcagaaataaaacagtaattatgtattccctcttgtctaacatgagaaaatgagcagatttttatttacattcatccatcttccaactttgtcttagtttttgttgataaaatagtgaattatagatccagattagaactgttaagtttttacattatgcatctttgccttaagtagttacattttacattaaccttccattttgtaacacacttagagccattattgagcattaatgctatgtttaattagttttatgctcactgtaggtcttcgtattccacatttctcaattcttgatttctttattttgattaattgctcagtcaattgctctgtgaatgatttattagaagcagggaacgtgggagcccctggataccgagaatggctttctgatgtatttgcacacgaacaacaacttggctgataaagaatttgtggattataacactttctcctcaaaaatcctccaggcttaacatcattgtctgctgccctttatgatatggaaaaatttgagagggaccaggcagagatttgttagactgagaatggctgttctgcttcaatgaccctttcacccaactcttctcagtaaaatttaatactaaagacagtcatttgaaacagtgtgtagtttttcctttgccagaaaagtacagccttctgagtgcccagctcccattgcttttcccctgtctgttcctgtgaggtcaagtgcacccgcaagacatgtggcataagcactcatccaattccattcctgcctgtgtttcgttactgggaatcttagttacaaagcaagagtacatatgcatggtgtggaatagaaggcacaggtaattaaatggccttgttcatttctgaagcagtgtcaaaactgcttctgagatgaggcagtttcagagtgagatccttttttttttttttttttttttcctctatggcaaatccctgagtcttgaagagggaggtctctgatatgatgtttggggagcaaactgtcggaggcatttgaacctgagcaactccatcttaaataggacctgggtaaaatgaggctgagacctactgagatgcattcccagatggttaaggcattctaactcacaggatgagataggaagtcggtacaagatacaggccacaaagaccttgctataaaaacagcttacagtaaagaagctggctaaaatccaccaaaactaagatggccatgagagtgacctctggtagacctcactgctacactcccaccatcatcaggacagtttacaaatgccatggcaatgtcaggaagttaccctatatggtctaaaaaggggaggcatgaataatccacccttgtttagcatatcaaggaatagccataaaaatggacaaacagcagccctcagggatgctctgtctatgaagtagccattcttttgttcatttaccttcttaataaacttgctttcacttcactatacggacttaccctgaattctttctcacacgagatccaagaaccctctcttggagtctggatcaggacccctttcctgtaacaaaacctctgtggttggctcagggccaaccactcttatggtgaggacattccttctgatgtgcatttgttggtttcccgggttctatagccatgctctatttctaggttttctgagtatcttagtgggaagaataaagtaaagctacttctttcccatctcatcatggaaacccaaccacaacttttgatatgtgccaagagcagggaaagccacaccttcttagagggttgtgctgaactgataaactggccagtgtgggatgccgagaaccgagaacaagatgagtcccagatgcttctgccaatttttatgtcttcctgctcaatacatcagagtgcttcatgcagcgggaagaccagatggacaggtggaaggcagtctggcagcttctctttgtagtcttatgctctctgtgaggagtgttgcttgaaccagtaataaatgcagaactgaaataccacagtggaatttaaatgggtatgtggacattctaaatgttaattagttcctcaatccgggtttctcaccaagcactgactgccattgacagattaaactctcaatcttggccacccagagcctgcccaggctgttccccacacacttcaccaaatcttgcttctgtctcaggcttcccttctccagcaagcttctcagttctccatgttatacactgcataacaaggcacatgacagactcccttacatttctataagctcttggagggtacatactacataaacttaatatgaactgtagggcttagcatttgttggtgtttgttaaaagaaatatgaccactttggggctgggcacggtggctcacgcctgtaatcccagcactttgggaggctgaggtgggcagatcacgaggtcaggagaccgagaccatcctggctaacacggtaaaaccccgtctctaccaaaaatacaaaaaaattagctgggtgtggtggtgggcacctgtagtcccagctactcgggaggctgaggcaggagaagagcgtgaacctgggaggtggagcttgcagtgagccaagatcgcaccactgcactccagcctgggcaacagagtgagactgtgtcaaaaaaaaaaaaaaaagaaagaaaagaaaagaaaagaaaagaaatatgaaaatatgaccaccttgatggaaaatacaaacttgtgtaataaaacaggctaaagatatttagcttgcagaaaagacaatcttatgggcacatttatatagagaagaaaagggtgttagaaaagatcttatgtaactgaaagactataaaccaagaaggtggttgcattggttttgtaggatgctaagagtgtgaatcaagaacaatggatagaaacttcaataggaaatatttcagtaagtacattaaaaagcctccttagagacacagcccactccctactccagaaaacagtaaagctacctcagagataaatgagttctctgtcattggaggtattcaagaataagcactaatgccagttaattggtgttgtagtatggatagaaccattgttttgtgtgtgtttgagattgttgaatgacctttgatatgctttccagccctgtgattttctaatattatgactggtgccaatccttgaccaaagaaatatttgacacaaaaatggttaccttgcgtgaacccgggaagcggagcttgcagtgagccgagattgcgccactgcagtccgcagtccggcctgggcgacagagcgaggctccgtctcaaaaaaaaaaaaaaaaaaaaaaaaaaaaatggttaccttgtttttgtttttggagaaacactattttctaatgtgaccaatggcaatgaaaaagggcgtattaatcactaatcaactaaaccatgattagtgcattcctagatagcaaattgatagatattattattatatatgaagaacttaaggatcagagaggtcatgtaatttcctcaagtaaagcaccatctctttactttaatacaggagtgtgcaaaggttttatgtaaaaagccatataataaatatcttaggctttgtggagcatatagtctctgttacaactgttcaactttactgttaagcatcaaaacagccatagacagtatgtaaatgaacaggcatagctgtactattatttttttaatttaaaggcatgaggtaggatttgccccacgggccttagtttttcatcctctgctctagagccctgctgacttatcatttgagaatgaaaaaatgcaaacaaggcaaggaatggcctccatgtggccatacttactccattggctttgctgagtgcctggaagtagatgctgtagcttttcaggggagagagaggagggttccagtagccattgtatgtcttattgtcacccactgtaaatggctgggtgacaggcaggttggcaggcttcaactcagcagcaaagtagtgtagagaatcgaggctggaggcattccgatagctcacgggcaccgaaaagcactcaataatgtcagctgccctccgtgacttctgaagtcgctcctccttgacaaccagctgataaacactggacaggaaagaggagacacagatggttgagcaactttctggaagaatgagcttgttagctctaatggtgtcaacccaacttctcctatgtggaagcattggttcggtctacaacaaaactccagtcctgagcatcagattttcaaacctaccacgttgtagaactttacctccacttagctgtctcagagccagctcacactagacacatctaaaactcaacttagccccaacccctacaaacctgtctgctcctccttctacatttcctttcttagtaaatggtagcagcatctgacaagtggccagaatctgaatctagggctcatcctcagttcttaactccttcgttctcactcctcatcctaatcaacagccttacagaagtctgttgatttggcttctgcaggtttgcatctgccccacctctcttttctccttccactgataatgccttggttggacactttcccacttacccagattcaactagtctctttgcctctaaggcacttgatttattaatcactcatcctaatcatatggcttcctaatcatatagctcttcaaacactttcataggccttccattgtccaaattatacaatctgaactcctaatcttggcatttgaagtcctctgtgcctgccttctgtcttccatttagaaggtcttctcatggtgttcccatcttccagctactccagaccccatgctattgcacagacatcttttggatctcacctcatgcattactgacttatgcttcctctacctgcaatgccctgcatcctggccacctctggtttcctccaaaggctgagcatgtctttcacttcctctatgaagcctgtccagatatgtccagtctggatgaattacctccctctttagttcccctagagctcatctaatctccatctgctttgttttccaatatcatgagatgggactactctttcactggctagattgtgaccttttacaaagtaggcattgttgcttacttatctctgcctcattctccacccccaccccatactgcccagcaggatgcctgtcacccaacaagtgatcaatgaatgcttgttcaaatgaattaaattggattgaattaaaattgaaagcaaacatgaaaccaaatctgcctggatgcagaaaccctaatcggataaacagcgattgccttgagttcctgtctagtgatctcatattgttcccttcaagttagaaggatgtaagaagatgctagtgtgtgaatagagatgactgatcctttattgaatatcaactgatacccaatgttagactctctttgtaaaagttcttttaaggtttgtaagttggagaacatttttcaatctctttgaatgccccacagtttatagttctctggaataaatgctcttcttttagaagagctttattgcacagatctctgggactcatgatctaaaacagaagatcgattgcccaaagagtacccactggagacttctgtgaattaatgaggtggttgcagtaggggaccccaaaccaatcatttaaacagggcatagtgaaccagcatgtggtttatcaaaaatgaaacgtgttgcaggctaccatccttcaatcagactatccatctaaagacacttgattaaggagtacaacttgggagatgacagagacacaggactatttcattaaggaaaaaaggctatggagaactgccctaagaaaatgtgacacactcaatatggcaagttttcccctgaattttcttgagcataggaattttcaggcatgcgaaaaggaagcgctgggcatatgagtatatgccacacttagatgagtgcaggtaaacagcagctcaatgaccatgcctgttgtacatacacatctgagtaagaacctgacagttcagagtgcatgtgagtgacatgcgagtggatgtggacaatctctcaagaaatgcacactacatctgagggtgtaccatttccaagtgaggatctgtattacctgggcatctaactccaaatgagtaaatataacattcagatgaacgtggctaacctgagtgtttagacttctaaataagtgtgtgtaacatctgagaaggtgttaacaatccaaagtttgtgtgtgggtgtgcaccatctatgcatgttcataatgcctgttgaagtcaataaacgtttaaattaaattatgatttcaataatcacttcctcctcaactctggggtccttctcaactgtacaattcctatgtttatcaggacagctaagctcaaagcagtcactgaaaaatagcacaaggacctaatacccaaacctagaggttgcagggcagaagtggaggggtgtttgtaacagagttttcaggacctgcactgctttataaataacaatatattcaggtaaatctttgaatctggcttgaatgctaatagtagctcgaccagttgagggtccattacttgtgggactctgatctgtgagggaaagggcaaacacaaaagagcttcatgaagcagacaacctcttgggctctcctgctgaagctaacaacagacctaagaacactgcattggatttgggagcatgcaaccaaagcagtcctcatatcctcttcagcagattagaaggaaccaatagcctcatccccaggaccaggagttggaaagagctgggagtccctgctttcttctgagggccagcctatccctaatcaccgcttgaattgatcacatctacataacaaggcctttgtcttgctttctcagacagacttcccattctaccttaaatccttctgtcatctttcccctctaaattgagacccccgaagccttgggagcttccctgggactgaatccccctccaagaatcagttcctactgtctctggccctcccgtgatgggatggatcaagaggaaccacatggctgtcctcatttactgtccacaactagcataagattccatagttgtggccaagcaagaagatgggttctcactgggctctgaacattcaaatgctgccaaggactattagacacagccataatatctctgtgagggtcagcctgtatatccccatcagctctttctccccaccaatctgattactgaagatccacttgtcaattcaaccaagctcaaaagccagattacacatgaggaggctgaggccgagaggtcaagtgattcatgagggtcaaactgcagcaaaagtagaaacccagacttttcattcatagctcagtatccttcctttttttttttttttctattttcttctcttcctacaaaccaataaaacgtataaaggggcttccaagcatttttttttaacttggcatcctaaactgcttagctctatcccaaccaactccatatgaaattacaaagaatagcaaagggtatttttttttggtttaaactgtgcagtcaacatatggttcacatacgattgtgattattgtgccaaaatatacccagcaactccttcaggcccatgcattcacagcctgtccattcaaaagcaaacctgcaatgcagccagaaaaatttaaatcattttgttagataaatctgtttgccagtggattcagcctctctcaaagaccacagaactctgattgaagaggtggagagaagaaacagcactcacaagttgtataactttcctttcctgacactttttaggaaagggtgggggaaagaaacaagaaattgggtattatttgtatttcttgcaatagcttcattctcattctcttgagaatacatttatctaagagcatgttcttttcagcttgctggtaatgataaaatcatatccaaatgtgaatgacctcccttttggggtcatatctccagctcaaaaacagtggttgcaataatctattcagaatcatttttaaagagaaaggatttttttagtaggaaaaatcccaataacatgagagaagaataacctaagacactcaccacacagcacatagcatttactcatacattttctcctcttgtgacaccctctctgtttcttccaatgagaagatgggcatttatgacctgttttttcattacttatgccaaggatctcttattgcaaggatctaagagttatactgtgcccccaactaatttcattcactctaaggtgacttctgtaaggtcaaggagagtttgtactcttactttcagtatctcctgctgtccatccaaggcaaaaaccctcagaacctctccataggctttggaaaagcctgctgcttgaccatcttcctccctctggaccctaagctaatggtttaaatggtggcttgagattctcggaccagattccactgagggggaccagggacctatcagagcctccttccatcagtaacagttcctgtggccctctttctatatctagaaaagtttctagctaggaggtgtatcctttcagaaagttgaagtcaggtgacagatggagtgtatgctttagctcacaggtacagattgcccaacttcagaaagatgcatattttagtccacgttctcccagaaggaggcatgtctgagttcaggttcttccagaaacagaccctgagccaaagtttcactgcaaatgatgtattgaggaagtagtcccagaagaaactagtaaaggagtgagagaaaatgggaggaagtggagcaagggtgtgatatcaggcaaagtcccagtcttagcctgatctcatagggagctctggagcataaattatacccccagcatttgtctcatctcaaaccaaaggcttttgaacctccagtgctggtcagttattggctatgtctgcaccagagagacataaactctaaggcactcctaactttgtgtgagggtcagacaaggcggctctggcatcttaatggcaacatcccacagcaggtcacacctggaagccatttacatcaaagcacatggaagctgggagacggacacacagcagaaaaggggaggtgacagtgtctgggaggccagcaagagtggctctgacagggcagctttggacaatgaccatatgagacttgtgaaaggatcagagacctattttatcaaggtaattttcaaactttgtttccagcactcctcatctgagagatacggtaatctctcaccaatcatagtggcttctccatcactgattcttcaagtgagggcagtgaacagtcatctcagaatctcaatggagggttgctcaagatcaatagttctcaacttgtggctgcatattataattacccagagggctttcagaatgcttattccttggctctactacagatcagctgaatcagaatctctaggggtaggaccctagcatcagtactttttagaaaagctctctagatagttaaatgtgcagctacaaaatcataaacctaggtgattctgatgtttatacgcttgcccttatgtttattctgatatttatacctgtatagccaacaggggcattcccctccagtattctcactcccttggaagacacactgatttgagtcattccaatttcaccaaagcattaatacataattaccagtattctgagtcgttgtacaccacatctcctgatttatttcttccacagcttttatcataattgaaacatgtcttatttaattatttgtttactggctttactgcttgcccccaaataggctgccaacttcatgaggtctgagatcttgtcatctaattcattgcttctaataccatactagacacataatggtttttcaataggtatttcttaaaaaaaagaatttaaggtcgagcgcggtggctcacgcctgtaatcccagcactttgggaggccaaggcgggtggatcatgaggtcaggagatcgagaccacggtgaaaccccgtctctactaaaaatacaaaaaaaattagccaggcgcagtggtgggcgcctgtagtcccagcttcttaggaggcggaggcaggagaatgccgtgaacccggaaggcagagctgcagttagccgagatcacgccactgcactccagcctgggtaacagagcaagactctgtctcaaataaatggaagaacatttcaacaaatgttaagactccgatacaaacaaatggaagaacattccatgctcatgggtaggaagaatcaatatcgtgaaaatggccatactgcccaaggtaatttatagattcaatgccatccccatcaagttaccaatgactttcttcacagaattggaaaaaactactttaaagttcatatggaaccaaaaaagagcccgcatcaccaagtcaatcctaagccaaaagaacaaagctggaggcatcaccctacctgacttcaaactatactacaaggctacagtaaccaaaacagcatggtactggtaccaaaacagagatatagatcaatggaacagaacagagccctcagaaataacgccgcatatctacaactgtctgatctttgacaaacctgagaaaaacaagcaatggggaaaggattccctctctaataaatggtgctgggtaaactggctagccatatgtagaaagctgaaactggatcccttccttacaccttatacaaaaatcagttcaagatggattaaagacttaaatgttagacctaaaaccataaaaaacctagaagaaaacctaggcattaccattcaggacataggcatgggcaaggacttcatgtctaaaacaccaaagcaatggcaacaaaagccaaaattggcaaatgggatctaattaaactaaagagcttctgcacagcaaaagaaactaccatcacagtgaacaggcaacctacaaaatgggagaaaatttttgcagcctactcatctgacaaagggctaatatccagaatctacaatgaactcaaacaaatttacaagaaaaaaactaacaaccccatcaaaaagtgggcgaaggacatgaacagacacttctcaaaagaagacatttatgcagccaaaaaacacatgaaaaaatgctcaccatcactggccatcagagaaatgcaaatcaaaaccacaatgagataccatctcacaccagttaaaatggcagtcattaaaaagtcaggaaacaacaggtgctggagaggatgtggagaaataggaacacttttacactgttggtgggactgtaatccagttcaaccattgtagaagtcactgtggcgattcctcagggatctagaactagaaataccatttgacccagccatcccattactgggtatatacccaaaggattataaatcatgctgctataaagacacatgcacacatatgtttattgcggcactattcacaatagcaaagactcggaaccaacccaaatgtccaacaatgatagactggattaagaaaatgtggcacatatacaccatggaatactatgcagccataaaaaatgatgagttcatgtcctttgtagggacatggatgaagctggaaaccatcattctcagcaaactatcgcaaggacaaaaaaccaaacaccgcatgttctcacccataggtgggaattgaaccaatgagaatacatggacacaggaaggggaacatcacactctggggactgttgtggggtagggggagaggggagggatagcattaggagatacacctaatgctaaatgacgagttaatgggtacagcacaccagcatggcacatgtatacatatgtaactaacctgcacattgtgtacatgtaccctaaaacttaaagtgtaataataataaaataaaataaaaataaaaaaaagaaaatataaattacagcaacaatgagaaactatcacacacacccattataacggccatcagacaaaagacagacaaccagtgtttgaaagaatgtggaaaaactggaaccatcatacattgctgttggaaaggtaaaatggtacagtcactctgggacacagtctggtagttccttaaaaaggtaaacataaaagtaccattcatctagttattccatttctacctatctatccaaaagaaataagacatttccacacaaaaacttgaattaaactgttcatagaagcattatttataatcgccaaaacataaaaaccatccaaatgtttatcaaccaattggtgaatgggtaaacaatatgtggtatatctatgcaatagaatattattcagtaacaaaagaaataaactactgctacaatctgcagcatgaagctccaaaacattatgctaaatgagagaaataagacgtagaagactacatattgtatgattctattcgtatttattaagttatggagaaaaggcaaggccatagagacagaaatcagattagcaattgcctgggactggaagtggaaataggaatcaattgtacatgggcataggggattttatggtgtgatgaaaatattctaaaatgggactgtggtgatagttgcacgatcctatacatttactaaagaattgtacacttaacataggtaaatttatggtatgtaaattatacctcaataaagctgttaagagaaacagactgaataatcttcaatgtcctttcacacttcaaaagtctatgctttggcatttaagtatgcacaaattttaatacaaaatgctatgataaaccattggttttataggataagatgggctaagaaacaagtgtgagctttgtaatgcccaacagaatctagctttgcaattacattccctgcttaaaggtcactcagaactatggagctgaaatttacaatgatatgtcttagttagccaacctttcttccaagactctgggaattcctgtttttactcactatttgcctagtcaaaatagctcgcagaggagacaagaaaatgggaggaggtgtacattcggcagattagtgtcagaattagtgcacgtgcatctttgctttgcctctgactagttcggcgacctattgtcctatctgtctgtcttttatacatttattcatcagacatttattgggtgatgatagctcaataaagtaaacatagcaggttcaaatttgaatgcaacctggccactgggtactgggtgcttagagctcagagtggagaaataatgaactgttcactataatccaatgaagtgagggcagcaagaactctgccagggaaggattctgggaaggaaggaacctacagggcagtgcaaagactgaaattacatgtctaggaagtgcattctagaaagtgctctatgaaagttggctggagccttcacaattgctgcatgcattattattacaatattactgaattagacaccaaagagtggctttgtttcttatttgggcccttctcctatgattgaattgcatttgatacatttaatgaaagtgaattttgtgtagaaatttagaggaagaaaatatgttgggtaaaggaatcatgaaaatccagttgaagcatccaaataagttttccctcaatcatggctcttctctctttcaaaataccatagattcagtccataagcaattcccatggcttcagtttcaatatactgtatattgagaatctgactgcttctcagcatcttcatagttacagctctgaactaagcttccatcatctcttaactggattattgtaatagcctcccaactggtctccctgctttcacttttgcccccaaaatttattctcaaaacagtggctagaatgactccttaaaaacatgactcagctcaagactcccctctgctcaaagcccccttatggctctgaccttacttagagtaaaatgcaacatctttacaatgtctacaagactcactcttaagaactctctgatcttactcttctaattcttctccagttacactggcctctttgctgttccctgaacaccccacacacgctcccatttcaaggcccttgctctcgctatccccttccttgaatggtcttcccttggagataggcaacctaaggaaggcttactttttcacctctgccagggaagtctgtcctgaccactttatttaaaatagcaaccgaaatccacaatatagccaattacactttccctcttaatttttacctaccacacctaacagattaggtccttttaagagagaactgtaagcactgcaaatgtcaaccttcctttgggaaaaagcggctggatcaatatggggccagttaggcaatatttgggtagataaccttgatatggggacctttgctaaagcaaggtggaggttttagtactggcttcacactcgctgctctgtctgccatgctgagaaagtcactttacctctagaacttgcctctaaaatggaataattgtgaccaatgcaataagacacaaaacagaagagatacacattttagaaaggaaagcaattcatcgtcatttgcagataacatgactagacctaatatattgaagcaaatcaactgaaagactgttaaaattaataaaagaattcagtaaagtagttttgtagaagatggaaataaatacactgtacaccatggaaaacaagctagaagatgtaatgaaaaagccttttagaatagagtcctttaaaaatagctaaggaaaacacaaataagaaacgtataggactgacattggaaggaaaataaaactctactgaatgatttaaaagactatctccagcccctagcacacggcttggtagagtgggtgttaaataattgtgctgaactgaagatgaataaatggacagaaaggctgaaatcctggaggaaagcatcatatattgtaaaaatgtcaattcttgccaaattgatgtattgttttctttgagaaaaagcaaattgtataaaatatgagccagttaggtgatatttgtgagccctaaagatgtggatggccataatttgacaattccagtaagatttgttttgttcaaatgggaaatatggttaagaacttaaaaaaaaaaaaacaacaaaggaatgaggctgaaaaaccactactggatattaagttatattatgaagttacaatgattaaaccatgggtactagagtatgagttaaataaaaatggactaggtaggggtgtgtgtgtgtgtgtgtgtgtgtgtgtgtgtatgacagagagagagaaacatataattttatgtataaaattacacgcaacataaattaatgaaaaagaaaattttatcacttagtgtttcagaaattccataattatgagatgaaatcatcaaatttaagacctcgctacatatgaaaaaccacattatattccaatagttcagaattaatttatttactgaaaaattttagtatgcccttgccaaccaaatacaatgtgtgatccttgattggatcctggattgaattttaaaaagctttaaaggacaattaattgggagaattggggaaatttgaatgtgacctatatattagataccagcattatgtcactttgaaatttcctgagcgtgatgattgttttgtggctatgtaacagactgacctttccataggagatacaaactaaaggttttgaagcgtcatggtcactacaagtaaccctcaaatggttgaataaccatttgagagacaagagaaagagagagaaactaaatatggcaaaatgcttatgactggcaaatctatgggaaggatatgtggatggttattgtctcattcttgcaatatcctgtaggtttgaaatcaaagaaaaagataatcttgagtggaaaagaattgtttaagcttaataatagaacaatttacaaaagacaaaagaaaaatgacagatttgtctatatgtaaatctgaaatgtctgaaaacagaataaaaaataaaacaaccaattagaaaagctattcccagaaaatatgacagagaaggaagcaatattttaatattttaaaaatcatatcaggtacagcggataaaaatgacaaaggacacacataaaaatcaataaattatctgaataaaggtatagtctatattctgtatatataatgggatagaaccagaaattgctaaatcaaaattctgcacaaatgaaaacctccaactggggaaaataggaacttaccttatatgatgccttataagtaattctcatatcaaatagaaaatcaaagccacaatttcctgctctttagaaactattactgtgagaacaataatgtttaatgcttatgggacaggaccaaacctgttttcagcatctgaaaagcctttgttactaaacaaaaaagaatgacaataaattaattaagcattccataaagagaaaattagaataaacaacactagagccagatggcttttccaatgagttctttcaatcttccaggaatggataattcccatgtcatagaaacaattacatcagacagaaaaagaggaaaagcatctcaaattgttacaaactattcctctaacatactattaaattggtgctccataagtggatcatttactgcaggtacacaagacagatttagtaatagaaaatctaggaaaatatcacataaataaatccaagtagaaaaaagaaaagtacgatcatataagtagataccaaaaaggcacttgataaaatcactcattttaaaagagtcataaagataaactatagaatataaatagttttccttttcagatttcaaaatacctatttcaaatctacaactaacattatacgtaagagaaatttgctggaggtctagtgtttgaggttggaatttagacaaaaagttcagctattaatattatttggcaacgttgcccggaaagctctacccaaagcaacaaaacataaaaccaaaacaagagctattgcaactgtaataggaggacataaaattatcattattcatagatggtgtgattattagctggtaaaccaagataataaaacttaattaaagaaactcacaagaggtttcagtgaatgagatgaagaaaacacacacaccacacacacactctctcacacagtttccctaaataccagcaaaaaccagttagcaaacacaataggggacagatagcagaagacaccacaagcttaatgttagtaaaacaattttaacaaggtagctatggatggagtctacatgagagtcaatgcctacgtcctgagaaatagtcaagactcagatgaatagataggcttgccctctttcagtgtggaaaagctcacgttaatacatatagtcattttagattaagcaatagtcttaatataatttagaccaattccattggggattgtttagagaatatgataaagggatttaaaaattcatagggaaacataagtgggtaaaaatagccaagaacattttgaacaacaagaaataggaagactagatattaaaatgttttgtaaagctatattaaaatgggtgatacagacacagtgaccaacagagaggcagatctaatggaacagtataaaccaagaatatagtggcacacacacacacacacacacacacacacatacacacacacacacacacacaggcaacatcaccgttcagtaagactggaaggagtattcaataaacggtgtggaggaaatctgtcaactacttggagaaacaaaagaataaatactccccaaacatcattaaaatggtaatagctatcatgatatgtggcaaaagaaggatgcaacattatcagggaggatcaaccttacataaagcctattttttttaatttggtgactaaaaatagggaaaatttcccaaatgtcagtattttaaaaattttcctatcatttctatataagcatgcattattttgtggtgactctaacttaaacatcatttaaaataaaatgataacattgtatgaattaccttagtattgtgataaggatcaaagataggaatatgaaaatactttgaaaatatttttttaatttaatatgttacaaaatagctgtagtatcatatttttaattgatggatggatttatccacatgaacgacatggcataatctatgcctaatactctctacccagctgggcattgttgactattcaatgtttacgaaatagatcccatccctacttgactccagaagtgctattttctaagtacatgttgaaaagtataatttcaatcagtcaagaatccagtaatgtataaaagatatttgactcagcttaaaataactggctgggagcggtggctcatgcctgtaatcccagcactttgggaggctgaggtgggcggatcacctgagatcgggagttcaacactagcctcgccaacatcgtgaaactccatctccattaaaaatacaaaaaaattagctgggcgtggtaggggcacatgtctgcagtcccagctgcttgggaggctgaggcaggataatcaattgaacatgggaggcagaggttacagtgagccaggatcacgccactgcactccagcctgggtgacagaatgagactccatctcaaaaaaataaaataaataaaaaataattaaaatatccactagccaacagctctattagcttatgttaataactcaattaaacaataactttaagcaagtctatgtagtctatgtaggccaggcacagtgtctcatgcctgtgatcccactgctttggaaggatcaagtttgatgctgcagtgagctatgatcacgccactgctctccagcctgggcaacatagtgagaccccatctctacaaataataaacttgttttttgttattgttatacttaacaaatagagcattcaaagcaaacagtgctaaccaacagaagcaagaacaagcagaatgctgcaggggccctgctcctgtgtagtcacagaccagtagcatcttcatcacctaaaaagaaatgtgttggaaatgcagagtcccaggccccacctcagctctattaaattagaatgtgtactttaagaggtcccaacttatttcatttgcacattaaattttgaaaagcagtaatgtgaaacagaacacattaggggactggaaagcttgctggtttttgttttgttttgttttctaatatacattctgaatcattttctgtaccctagtggagagccaggctgttttctttaccccgggcctctcaaacctcagacatcctgggaagcaaccccctttatactcctgtcaagttctcagttgaaatgtcgttttctaaagttaccttacatggtgagaggagcaaataaaaaaaatcaagttaaacaagactagcttccatggggattcagctcctaacttggcgattagaacccacagcaatgcttttacagaggaagatgttattgtttttaaaagagtaatcagtagggcgcctggatgtctccccttgcaacaaagacatttgcttaaggaaaggaaagtatcaggtgaaatctctctgaacagtttttttttttttaaatataataccatctgaaatcaattatcttcaaaaagcccttctaagctctaaaaatgtaaatggaataattactaattaagcattaaattaatcgtaatagcaggcatacttatttgccagatagggcaaacaaatgcaagagaaaaattataacaccagttgaaatattcttcttatgggaagacgtaacctactgttgaggattgcagaagtgcaatgaggtgaaaatcgtgtatgcacagagaattggaggttctcatccatccaacaacagaattgcctgtgaattctggattcccatgatagacctctgagtgtgaggcttgggaatgcaaattttgaacaggttcaccgtgatattcttatatataccaaattccagagatgtcctttgggagttcttcagacccattcaatgattctgtaacactgacataattgtaatagtaatactaagacttcatttgcctttttccactttgttaatattgaccctggaaaggtaggcaatactgctggtgcctcaggagaactcaaggcagtggtacccaactgtacttgtcattatattcttcaccacctcatacttgctataaaagcaaaaatgccagtttcacttaagaaggtcctcgatgaagcagtaaaaagcattaattttattaaatctcaacccttgagtccatgtctttttcacattcatgtgatacaatgggcagtatacacaaattatgtctcctgcttgttcaggtactatgatttcttcaagaaaaaaacattttttttcttgtttttgagatggagtctcactctgtcacccaggctggagcgcagtggcgtaatctcggctcactgcaagctctgcctcctgggttcacgccattctcctgcctcagcctcccgagtagctgagactacaggtgcccaccaccacgcctggctaatttttttgtatttttagtagagacagggttttaccgtgttagccaggatggcctcaatttcctgacctggtgattctcccacctgggcttcccaaagtgctgggattacaggtgtgagccactgcgcccggccagaaaagaatatttctgtgattgcttgaactgaatgctaaactagccacatttttcatgaggtacctttttgttaattcttgaaagaatgactaacgaactgtggtcattcagatttgtatatgtggaaaacattttttttttttgagaataaacgaagtctctctgtcactgtaaagaaaactgacagtatttgttgtcaaagacataaggcagctttcaagtgaaaactagaatttggaaaacttgtatctgccactgtgaactgtaaagatcttcaataattaaaaattttaatgatgaaattggtggtgacagtagcaaatgtaatattttgatatggtacaacaagatatataaacatttggaatttttaaaataaatccatgaatatttttcaaatgaccaatgcataacgttgcaaaatcatgtaaggcaaagaatgcactcaagtgcaagacagatataaattttaacgtaaaagagtataaaaagtttactgatatttcattgcaactaaactttaggaaaccaccactctgagttttggtgtcatatgagaggagaatacccacaatgatcttaaatggctattaaaatattcctccttttttttcccaattatgtatctatgtgatactggattttctttatttcaaccaaaacaattcatgaggacagattaaacacagaaacagatatgataatccaattatcttctactaagctaggcattaaaaaagatttgcaaaatgtgaaactgtatctcttcaccctaactttattatttggggaaataaaaatatattatttatattaatatgtataggcttagtttttttgagatggagtctcgctctgttaccaggctggaatgcagtggtgtgatctcggctcactgtaacctctgactccctggttcaagcaattctcctgcctcagcctcccgagtagctgggactacaggcacaggtgccaccatgcccatctaatttttgtatttttagtggagacggggtttcaccatgttggccagaatggtctcaatctcctgacctcgtgatccacccacctcgccctcccaaagtgctgggattagaggcgtgaaccactgcgcccagccaggcttagtattgtttttaaatgaatttaaatatttgttaacatgtggctttaattccttttcttgagatggagtctcgctttgtcacccaggctacagtgcaggggtgcaatctcggctcagagcaatctctgcctcctgcgttcaagctagattcttctgcctcagcctgctgagtagctggaactacaggcatgcaccaccacacctggctaatgtttgtatttttagtacagatgggttttcaccatgttggccaggctggtcttgatctcctgacctcaagtgacccgcccaccttggcttcacaaagtgctgggattacaggcataagccaccatgcccggcttgaatttggctttaatttctaatacagtaaacattgatagacaaaacccacataaacaaaagttctttgatgccttcattaatttttaagagtgtaaaggggtcttcaaatttaaaagatcaagaacctgtgaatcatacatttttttaaaaaaaagtctattaagacccccatggttcagagtttctcaatcttggcactactgacattttgggctggataagtcttcgttgtagggggctggctgtgctgtgcattgtgggatgttcagcaggatccctgacccccactcactaactagatgccagtatcacctccgacttgtaataaacaaaaatatgtcctgacattgccagatatctcttaagggacaaattaacgctggttgagaaccactgccataggtaattaggaaaaggatgtaaaaagaaaattcacaaaaaagaaatgttaatagcataaaaatacctagaaaaatattctgccttgccagtaagccaagacatgcaaatcaaaatgacaatatgttcccatttaaatgcattaaattagtaaaagtaagcataaattataacaagccatttcagtgaagctgtggttgaactggtaggattctacaattccagtagcatttttaattgattcatcaaattggggaaaataatctggcaatggttttcaagacataaatgtttttatgacctggaagtaaaaagagcataggctcaggaatcagcattaaacttgaattttagctctgaatctcactggttatgtgatcttccttaatttatttaaatgatagcatttataagaactgaatacgataataatgcctccatcatttgttatttgagaactgcaatagacaataatgtaagtgaacttctagttaaaagcggaagaattaatgtactccatttacctcttctatctcctcactgttattgcagtgaaatgtgaaaaagcatagaaatccacaaggaaaaagaggacaggagaggggacatcagtggatgagcagttttaagaaaattctggaaacctaaaaatggtcagaggagaggtaccacatgtgatgagataaagaaagtcaaattgcaaagacatgtgagtaagaatggattttatttgccccacagatttcaagagagattctgatgttggagtagtcaagtgtggacagtgtggaagtaaaatgtggggctgaaaaggggtgtttatcaaaagtctgtacacaaaaccatcaaacctttgaacatggagagctatgtgtctgccctctaccccttaggcaggagataggaagaggatttcatttcagaatttgaatgcctccgcctccaaaagcacagcacctccagtcaactttctcaacaccttacttttaaatattggctatggaggttcactggttaggtaagcaatgcttccaacatgaaagagagcagtgaattaaaaaaaatgactctagaagaaacagagataatacaggagtcagaaaagcttcccccttctccaaaatcaaaatcatatcctgagatgtttgagaaatgattacttctataaataagaagtgaatgttataagaaaaaaaattcaaagaacagtaagtagctcaaaatgaaaaattatgactgccaaaattataaacaaatttgagaatttttttgagggagttgttctgttttgttttaggaaatagaagaaattggcagaaaagaaaaggggaaaaagagtatttaaaggcaaacctaaaatgatggagttctgtgggaggaaaaatgtatgaatagtttaataaataaactgcctgaagaaatgagaataattgtacattctataacgaattaaacaaaaaagcccacaagaagagtaattagaagtagtataacatagtagtacactccagactgtggggctagaccattatgttcaaatttcatatcggctgctactagctgcatgatcttgagcaagttagttaacctttcagtacttcagtttccccatctgtaaaatagggataacactagtttctacctggtagggttttgacgataatcaactgagttaatatacataaagaacttaaaatcttagcaagctttaaattaattatgtaataatataatacttacatattatattatactgtaaaagaagtaatataccatttggctctgaagtgacctgtttttatggaattgtaaagttggccattgtgtagttatttaacaaaaaactgtggcttaactacattggaaagaaggaagggaggtattggatgatttaagacagacaagttaccatctatcatagcaggaaataaatagataatgtctgcaatcgataactttaaaatagcacattatgtagtgacattgccaattcccagaagaaagagcaaagaattaaaatgcatttgcctctgaggcacaggactgggggagggggggttgtaaatggtggtgttgggaatggttgggctatttgattttccaactatgtgtatttgttactttgagattttttaattaaagaatgaaaaaggttaatgtatatgaattggctgtcagtgcctggcatattagagaaggcactcagtacactgtagttcaatttttttcatttcagtaattgcattcctggggatttttgctatttaaaggtacaataccaaaagaaaaacatgaataaatttgtgattgcttggttatttataacaaaaaaaactggaaatgacccaaattttcaaccatatggaaatagctaagaattacgcaaaaagctgacaaaatttcataaaccaagaacatgagtttattgtttcagatggctgtggattagctaaaactgactgcacacacacatacaaagtccctgatgtgtttagactaggaaatagaaacctgagagaaactggatgtctaaagagaggaggagatgtagtatatctctactctagacaactttctgtggcctccagagtccttaatagggggcctcgcagctacttcagtcactgggcaaggggagttttttcccaaaactgaagagtttctttttgagctgtggcatggtctttcatacttagagtttgcatcactcttcaggaagaatgcatactcacaattgatgccactaatagcaatgcttacagatatttagaagcccccccttccctggctctacagttagactcaccattagcaaagtcaagcctcacctggaagtcattccaagctgtagttcgacctccaacttacaatgtgtcagaaaacccatttcttagcagagctattgatgaaaattatatgacaacaatgaaaaaatgtaacataatgcatctgagtctgcatcagaacctacaagagctacaggtcctaagatactatgagctgagcaagccatcttctcaggatctcagttttctctactgagaacaggggattattttttctacttcagggctgtattgtgagtgtacagtcaatgaaaggatgcttggtatcctcaggttctcatctcaggttctgatctagaggaggagctcaacaaagctcagttagatgtgactttgagtgtgtatgacccactccttaggactgggcttctcagactgtacacacatgagcatctcctggaggacatgttaaaacacagattgctgggctttactcctagagtttctgatttagttggctggggacagagcctaaacacttgcatttctaaaaaagtcccaggtaatacatcagtattcgatctgggaccaaactttgagaattactgtcttacaggcacaaaataccagcttggaaaatggttgagactttggagaggaaaagcaaaggcaggacggaaaagcttaataagggttccttatctgccttggtcctgatgcctactaaatagagtagaaccttggtgtgatgtctgtaccagctccacctccttcctaagctcccttctaaggctctcccagcctccagacctgaacagagcctcccgtgtcagcttcctgaactgaaagatgactaccttttccatctgcctggagcctatgggctgaggcagaggccacctttttaggttccaagaaattatgcattcgttatggaggaaattaacacctcaaagcaaactataattaggaattcttcaattcagtttatgctttttcaattaggcactctataattttaatcatgggagcattaacatgtttctgtaatttatatacctgcagtataattaagcctgggaaacacattgctctaaacctgaatggaagtgattgtttcccttcacacttgcagtattacatgtccctgatagagagatggtgccagttgcagaggagccatttgtgagttggagaggccaatgagagaactcctggctttggaaatatgatggctgttgtagaccatgtgatgcctttgaacatctgcatcccaaagcttcaactcctattgtgactttcaaaacattcccaccattggaaactgctttggacaactattcttggaaactaatttcaattaagcaggaacagggtgtcctggcaggggagacgttatctgagagccgtgggaagcagatggctttgaattgaagaaattgaacaataggctgaaacttagcctggattgggaccaaattcctttttttgaaaaaaaacattgattcctcttcctactttttctaactctgtttctctctcataatttcagctttgccttttagccacaaagcagggcctgaatcctatgtgcaaggtagttctcttgggattctgagaagttctgcaaattcaaggaattcagaggcacactgaaagtttttgtgcttattcagactgaacctctgaactgtctgaaggttaaaaaccttcattttttctctcttcttcctgctctccccacaatagcaaattcagatttgctgactacaataaaaggaaaaagaacataatcaaaactggcccggggggacaatgcatacagattccaacccagctgagtgacgcgtgcatattgctgcagcattttggcactcaatatattttgtctgatctaagaaaatatggaactttttatagagtgaaagttggaagtggatttgtttctcccaggctgctctagccttccacaaaagaacacagatttgttcagattctgatattctgatattcagcctcatcaaacatccatcttctacctagtccccaacatccgcatagaagtgaccgtattcagatatgctgtcagcatgcaacaacacaacatgaattattttgacaccagttattgtcatcatcataggaaaacagaggtgtgtttttagcccccacgtggacagggatagagaaataagctggcagagattctagttcagcttttaggagctaaaactggttatcctcatgctgaaacacacactgagagagacatgagagatccaaaagctgtaaactcaacaggggcaacttcacagaacaaggcaaaactattgcttccctatatcacaagaatgagcaaatattggtgccatagaagagatgacttggttccctgtacaggttcctttctccatacctgaggccacccataggccacaccagtagtactcaagcgtggtccaagaccagtaggtcacctgggaaattgttcaaaatgcagattctcaggcattatcctatagtccttggggacaggcaggactctgcaggcttattagaaccccagctgattatgatgttcattaaagtttggaaaccttgggattataccacttcccacattctatatccagtggaagtgatgtggggaaattttagaagtctagctcggtagatcagaatctccacagtaagtaagcccagccataggtcccacgctgttttcaggacctatacctctgtctaagtcttcattacattgctcatctcttatgataggatccctggcctttacctctctccccaaacgcctgccaaataacctctctgaaaccaaacatgggccttgacctcttcttaccaaccttcttagggtctagagcaatgtagtaaaatagaattttctgtcatgatggaaatgccgtccagtatgtcagccactagctacttgtggccattgggtacttgagatgtggctaatgcaaccaatgaactgaagctttaattttacttaattttaactagcttaaatttaaatagccacatgtagctattaatgatagttactgtattggacagtgtaagtctaaagtctagccctcgattcttgcagttgttactgggggtgctacatcttgctctgggcatgaatacttatatgtttataaaattcttcgtaagcctatacctaagtggaaatgcactaaatagcaaaccctaagcagctgtagccaggtaagaaaagggtgaattgtattctgagagagtaaccacacatttttttggcccattggtggagactctaactttaagatgttattttcctaccaaaaagccagggctttcagaatcacttctctcactgttgccaagtggaggcaactccctgagcagccctcaacagctggagcaggcatcgtgcagaatgctttttggataagagcaaacctccttggattctaacatggcacagagccatgctctaactcagaagaacatcaatagatcaggctatagaaatgcacttgatggaagcagacttgaaagtctgacctttgggcagttgcggacagagaccgagagccatcggttatcagctgtgcaagatctgagacaaagcagcgatgcaaactctcatggggcccagaacagtgggagaagtaaaagtcagcagaaaaaaaagttagagaaaaagtaaggaccaggagaaggcatcttgcaaggtcaccgagttctttcaaggagtttcaccagttccccagggttggagggtttgtattataagaactacatctacttggactgcccctccatccttagtctggcctcgtgttccttgcaacatttggctccaatgaccttcaccttgaatctattactgtctgttcaccatcactgccaatgtggtcacaccgagagccatcatatcctatagaagagttttattactgacaccttatatttgatcatcttattctccaaatagcacttcctgtctttctacactctccctgctttgtaccctctgcacaaattcttcaacagcatccaggttgcctggccctcaatatatctattttctgaacagcaaccttcacattctttttaaagcaagcctacaccagatggtccattttccagcacttttgttgacattatccatcatcttcatttctctgtagtcctggatcaacttgtgtgtctttcttcttttctactacaagagcttcttgaagctcctggagaagattaaacgattaaaaaaaaattaaacgattcttcctttgaatttcttgttttaaaagaaaagaaaagtcaaaatgaaatatacagccctggttttccttctacctctttggccagtccttctccatctcctgtgtgtttccttgataaagtttcgtagctctctgttctgtttctcatctcttctaatctacactctcccaggatgaggtcatccactcccctccatacttgaaataccacctggatgctaatgactcccaaatctaaaacccctgctcagatgcctctccagcactccagacttttggaatttaaatagtccctatggtaggaggtgagcatgacaaccactcttctttccctcatgccagtaacagtccctgtctccatctctccagatggcagacagtccaaaatagaacactctttcgatcttcatgttccatcgactgctccatttaaaatattcttccccaaacacctgtttttcctccttggttggagcctaagtaatataatccagaatcctaacaccagagccaattcttggtaagctgagttgttggtggaggaaggagccttataaaaggggacctgaaatgcagtcagggtaaaagctgaagtgaatgcaaacccacctacattatttgggtgtcacctttcttcccttttgttttcctgaacaatcatctaattgcagctctgtgctatatcaccagactgacctttgtctcctagggtgatgtctttggtggtacacacataacccttcaatatgtatcccaatggttggcatatgtagactgtgggacaacctcatggagaagggcactacagtaacattcatcccttattctttatttctggttacctcttcatatatctggcttctcctatttcccaatctggtgtgatgaagtcccagcgtgattttaggcatggctaaaagtggtgttaacaaagctacgtcttctcccaggttatgtctgggtatctcttatccatgtccccctaacccccaatacaccaaagtgggacccatagcattcctcatcatcaggtcccagcaaaggtggcccagagaactggggaactaagtgaataaatgaggtttggagaaagagtgtctaaatgtaattacagtttctcatctttcccaatgtggacaaggcctcacaaactcctcaggctgccctgtgtcaataaatcctctaaatgttcgtttctctttcctaattggacaccatcatatgctggtatctgagaatcagacggtaatgattccaattttgctcactgcggcttcatggaccagcaaaacccctctgtgattgtttcatgtgctcccactctgggcttcacagttattaaaggaatcctgaaggaaatctggcaatcgtttgcttttcttcccaataaagtttcttctttctttaaaagtaggctgtatctccaattggtactgtagctaatcactgtgcagttcagaatctatggtcttaactaactgcacctgtcaaatgcaaaaggatcacagattctcatcaggaggtgaagagaacttgcaatgacctttagaagtatatatcttgttacactgtcttctagggttccatctttcatacccctggtcctccaggctagagttcccacaccctgtgcaccatgcctcaagcaacctaagaaagcaggtctcatgtcctaactgaccttgtaaaaggtcccttagaagtcccccacactctcctagaccacacgccaggttgcagctgtccttgctcagctgagttcctaactcccccattcagttcccagaccacctttgccaccattcgcctttcctggatgaaatgtcctcatagactcttccctccctcggcatctattggctcagagaatggcaccactttccatcccacgaaccaagccagaaaactgggagtcatgctggacaatgtcttttccttcacaccccaacaccctgccccttggagaagtcatcacaagccatgtccattttacctcttacaagttgtatctcatcgtcataagtactctagtggtgggtcaccttcatttcttatctgaacaatgtaactgtctcccaagggtgttgctcttaaccccgactgtgctggccctttggcaatgagatactacaagcttgtctgcttgaatttatatttcggaaaggtgctcatatctgaccaagttcacagactcataggcactttctttttctgattgtctttcctatttttaaggtaatgttgttttgaagatcacccctggagatgagtgtaggtttcctgatgtgccctacactggccagcacttcgcatgtagtagatctcacatgagtgctggaggatacacagcagataggcattggcttgcagcagggctcagagaaaattcttgcccatggctgcccatggcttagagccactctttgcctcaacagcttggccaaacacaaggactatgtttctgttttgttttgagacggagtctcgctctgtcacccaggctggagtgcagtggtgtgatctcagctcactgcaacctctgcctactgggttcaagtgattctagtgcctcagcctctcaactagctggaattacaggtacctgccaccacacccaacgcatttttgtatttttcatagagatgggtttacaccatgttggccaggctggttttgaattcctgtcctcaggtgatctgcctgccttagcctcccaaagtgctgggattacagacatgaggcatcaggcccagcccccaaagagcatgttgaacaattaccagttgcaatttacacagtttagcttattcgaccttcaaaacaatctgtgatgtaggtattcccatttatcgacaagcaacttacggttcagagaaaataagtacctgcttccagtatacccagtgggacaattggataagactggtctgattttaggagccactcctgtttcagtgtatccaactgggaagtcagctatggcaggaagagcataatggtcttaggtctgagtgaggagctccgtatgggacccatctctgccctcagggaggccacagtctagcagaggctgacaacgcaaggcactgacagagggatgaccatgacagagtggcaactcagaaggagctggtgcattctgctgcaagagtggagatggtcctggatgtggccagtgtgaaccggatgttggagaggtggagaatggcatgcttggtggagagaacagcatggactaggggcctgtttgctcagagaaggacaaacagttgggcactcaccttcccaatgttccacactcccttctgaacaaagtctaaatccagagtgaagaccttcttcacctggaccctgcctgctcctttgcttctctcctcatctctctgtccccacgcactgagctacttgtggctccccaaacacaccctgtaccttctctgtgtgcgcttttgcataggctgctctttcttctaggttacactcttcccttcttcactaactcctcctcattccctaggtctcaatttaagcaacactgcctccaggaagccctcccagcttctgagctcaccattctaccaagggctgcctctctactgaactctcatggaaacttctgaacaagctggccaaacacaggctcattggcaccttttctttttctgattgtctttcctgtagacctttaccatccaaaatggcagtcagtagccacatatggctcctgaaatttaaattaattaaaataaaaattttaaacatcagtttcctagttgtactagccatatatctggtgctcaatggccatatgtgttcagtggcagtcataccacacagcacacatataggacatttctgtaactgcagaaaattctattgaacagcactcttttcagaataagaggtagctgaaggcatatatacacacacacacacacacacacacacatatatatataaaactagttactatagatatacatatatatataaaactagttactatagatatacatatatatataaaactagttactatagatatacacatatatataaaactagttactatagatatacatatatatataaaactagttactatacacacacacacatatatatacatacatatatatgtgtgtgtgtgtgtgtgtgtgtgtgtgtgtgtgtgtatatatatgtatgatgccagacactatcccatgtaaagggaattcagtagtaccaagccttcagatttcttggagctcacagcctatagaggggtatgtagaaacaacagaaaacaaaacaaaaaatatatatatatgaacagctgtataacacaattaaaggctcaggaaagaactatgaaggaactatataggtcactgttgagtaaaacctggtaaaggggcagacggaaatgaaaggaaaccggaaacaaggctaaggacagattctgatgagccttgaattccatgctaagaagcctgtacttaatgcaatggaaaaccaatgacccatttaagaattttaagcaggaaagttaacttgatccaatttgtgcttccaaaggatcactccagcagttcagtggggggtggattgaaggatgagaagctgcagcaagcactccagcaagcatatcctggcgggtgcaggtccacaggatgaggctggaaagtgccaatgtgggagaagaagagagagcttggcccaggttctgaagtccagaggaccagtctccatgactaattagatgggaaggggaggaatgagggggaaagaacatttccaaggaagtcttcagggatcaggggacggtctgttatagaacctggggctctgcccccagcctcacttcagggactgcattataggtgactaattcatggctaagttactttcttatgaaggttagtacggatcagtcacacatcagtgtgacaggtggggcgtgggggaagaaggctcggcatgttcaagccagaactgaatattagattctagtcactatttgattgatcttttaagcaattctgggattctgtcacttaaaaaccaataaatctttgaaggcctgaggaaagcaatacaaaagcaataaatctccattgtggagtgttagaaaaataggccaagctgctgaggtggtttggctggagggatgagggtgcgggagccccacacagcaacagtcctccctgtcacatctcgcccccctgcacactcagttctaccagatagagtcagatccacagggcttcagaggagcagtaagtggcaaagcaggggctagagtttggctcagccagggttggagcatcactggcagaaagaagagcctgcctgagtggggtctgaaggccaaagtttctgtgtgagtctgtttgagaacacacagctccactcaaagagggacccactgaagctcacaagtgatagaccgggctcacacaaggcagagttggaggacccctgagaattcctcttgcccacccctcatgccctggttggtggaggtttactccgtagcacccccacaaaagggccacccggtcatcacgtgacataccaggcagaggaactcagaacttcccaggggagccatgaactcagagccaggatactaggtctatgcactgtctttaactgtaacaagccccacaagcttgggccaatcagttaacatcttagacttcagtttcctgctccaaaatggagatggtatttcccaaccagctgactcaccaggtaggtgaggatcagataatacaatggaagtaaaggaacaattcagaaaactaattcagaaaactattaactgtaaaatttattcgaagcatccttaacccagtgcatctagtgagttctttgagtcctgggatcatagagtgtccatattgttttctccatccttcacctccccaactcacacaactgcacactgctctgctttcctgggtggtgctcatctgtccagccagtctaccgcttctctcaatcactacagtcaatgtacctagtggtttcatatcatcttacagtggaactgcagaagcagctcaatacccctgggttgcaagaaacataagccgagcacaccagatgcaccaggcatgacaccattggtgggacctaggtgcttggactaaggaatggggatagtttaataagtgaacaccacatggcatgatccatgattcaatagcatcacctcatgacatgatccagtcagatcaagtctcccacatcacgacattgcaaatgtccaatcagatcactccattaccttctgcctataaaacctgtccccgcctccaaaagcctgactcctgtctccttgttcagcagccttgcaataaacttttctctctacaaaaacacagtacttcagagtttggctttctattgtgcatgggcaaacagaccaagttctgttcagtgacactttttttgctaatttcatgattttgtttgtttgtgtgtttgcttaatgtcccacctccctgcctcactcacaaacaatttactggagcctcaagaggacagaggtgtggctatcttgttccttactgtatccctattgcttagctcacttccctaaacatactaagtgttcaataaatatttgttgcatgacctagtggtcaactacctctcatataacatcctactgcccagagttcaaggtgaatgaaggtcaagataactgaaatccattgtgatatttccacttctgtccttccagttgtcctgaaattcgtgctgggtggcattggttagtcacttccccttctagtcaaatgctcaagaaacagtctggaaataattccagaaactgagtctacacccaccctcaatgctctagagccttgagaggaaaagcagccagacatttccagacaccaaccatttcccctttgagcagtgacatttcttttatttatttatttatttatttatttatttatttttggataaaaatgtcaccaaaatatatcatgcacacctttctcctaggaggtggtatagtatagtaaaatgagtgttggctttaggtcatttgaactaagtttaaattttgcctgtaccgtttgctggctttatagcctgagtcaactgacttagcttctgtttgtctcaatttctatatttgcaaaatgaggagactattatacaatgttgcgagaatacaggtagtgttatatatagagacaagctggtagcaagtgcttgttccttaaatgaaagctagcaggctcctgtaagttgcagacccatcttttcagggtaaaccaggaccaagtaataaacacgaatggctatgagggatgacagcatgtaggcctgcttgatttttgagtccctgtgtctgttttgtagagttgcgctattcctttgcaccctgacaactgtcatttctcattgctactgggaaactttcatccccttatccctcctcataatttgttgagtcttacgatatataagcttgttaagtagacatgcaaaaccaagagtatagagattcagagggaaagtgtaaagacttctctgacttagggggagcattgtccaaagacttcagactacataggaacttctaaattggtggtggttggttctgtctatttcaatgcctatcatttctagatgaagctggatacaggatagacaatggctagctagaccatctcaaaagcccccttctgggctggtgtcctagcctccagtgacacaaggagtgaggctgcatgcatctctctagtagctgcccatgtccttcaaacaggcctgagcctctcaaacacactcccattctcatcccagcactcccaccttgatgtttatgttaaagcaacaaccgccctggttgctccctgttatagcatgctgtctctctcctccatgcctgtgctcacactggacactcttacaacgttggtgaaatcttaagcatcatttaagatacagctcagtgtccccactgggaattctctcctctgagctcttatgcgtatctccacaacgacacactgtactgtaattatgtttctgtctccccaactagagtttgactttctttaggatgtgacttatccatggctagttcactgctgtgtttccaagcacttaagcattgcccgagacagggtggattcttaaaaaaaaatgtttgttgaatgaatgaatgaatggtttttaggccttgggccccgcctcattcctggtacataacatactgagtttatgcttgatgaattgaactgagcaatttgaaagttgttccactcaatgctctgcttcattttaagggactgtagtcctccttcctggagttctgggcaaaaccggcagtcaatattgctgcccttgtgcaaagtgtatcttgtttaaaagagatgcccacgctcctgatatcatgaactagcagtggtcagtttaactatggagatgcgtcagtgtattcctgatctccaaccacgtttggtaaaatcagcagttttaccttgacagcaagtgcccctatgggactccagcaccctacagccttaaactggaccagtccccaggtcttgtcagatttgtgatatctgagcaggttgttttcagtattcagcaaacctgtctatctggctgttactggcagtgacacaaagaaaagtgacctttccaggagactgtgttccaggccaccgaccccactaactaaatttaccataaacatgttccaggaagtttccttctagaccatctcaggtcctgattaggatgtttcttgttttttttttttttttttttttttttttttttgagacagggtctcactttgttgcccaggctggagtgcagtggcatgatcacagttcactacactcttggtcttccaggcccaagcaatctttccatatcatcctctcgagtagccggtactacaggcgtgtgctaccacatccagctaatttaaaaaatttttttctttgtatagacggggtctccctatgtcacccaggtttgccttgaactcaggggctccctttgaactgggcttggggctgctgacctccttcctccgaggaagctttgttcctggccagtcttgcccatgggcattgccagtcacatgattcaactggaggcccatgtggcacagagaagaaaaactgcagactccaagtgaagaaccatcctcacctgacaggagctccccgggactgagcgggtttcagcatcactgtgatggtcgtgtctgtctcattcaatggggtgtctgtgtcgtactcaggcatggatggagctggacaggaaacagagagtgcaggtgagttcagcacagattcccaactggctccccaccgccccttgctgccatccttaaagacacagcatggatagagggaggacgtttaggaaaggggttggataagaagccttccaggccttcagtaaaggaggccccgatgcccaacctgcccatagtaggtttcttcaaggtgcagtagtgtggggaagggtagcaatgatctgtcgagtaacctgcatgaaccaaaacgttccacacctaataaacagatatgtgcagggaatataagtactaacaaagaagtgaaagcagagtcaaccttgccaaacacatttaaaatgcaaattacatcaattatgaactacttcccctctaccttttttttttttccttcatgagacctcccttccctcatactcagctgataggaatgcgactatatctattcctttgggaaggtaatttagccatttgtagtaacagctattaaaacccacatcctttttaattcagtttttccaaattctgaatttattcctaaagctataatccaaaccaatgaattaaactttattttgtaacatgtttattgaagcgttattttgtaaaaacacggaagcaccaaatatatccaaccacaggggaatgtataattaaattacgtccatccacttgacagaacattataacgaaagcaatgtagcaacataggaaacacttatgggataaagataagagaaaacattaagctacaaaaaaaacatgtttttctggaaaaccatgtgcaaaatatgtatgtatgcagaccagaattgcatacatatttaggataatgaaagctgtaaaaaaggttctgaaataattctgcattgttgctgtctagtggcagagggggccctacgggtgatggcagtctgtaattttggactactgtggccctataatagtaattcattcattcattcattcattcattcattcatcaggtatttcatgagaacctgcgctaatgtcttgttctggcaaaaagaatgttcctgaaaatgaatttaataaccaacttgtgtgcaatatacattatctacacacacgtgtactatttaatgcaagcctgtgggaaaattatttagtggcttgccacctaattaatctaatttttacactttaggaagttcatcacttagattttcttcataggagacaacaatggtaactcactagggactggatcgtcctaattccacccatatcacagggtgacaattcaagaaaaatttccacttcaaggaaaatcaggaagtgggggtgaaacaaccttttttcctttttcctttctagcagagatacctgaaattttggtggcaatccgagtggtgacagggggcccaaagccctttgctgtgctggccttgatggtgaaggaataggtggtccctgggtacagacccacaaagaggtggtgggtttcattccggagcttgaacactttccccctctggctcgagaggtcagcacttgggtccagcgagccgacagccttgtagttgatctgtaggacaagccagcaaacaaacaaacaaataaatgcctcactcaggaagctggatggagctcctttagaggaaccttagggaggcgggggaaggggcaggcatgtgaacttggccagcagattctgctaagctgcctgttgctgtccactttccagatgatcccagcctccaaataccccattgctcacccactggagcaatgcatgttctcattgatttgtaggagttaaaacttaaaataattgaacttacagagatagagagtagaaggatggttatcagaggctgggaagggcagtaccgggtggggggatggttaatgggtagaaaaaattgaaataatgaataagatcttacatttgctagcacaacaggcggtctatggtcaaaaataatttaactgtacattttaaaataactaaaagggtataattggattgtttctaacagagaagataattgcttgaggggatggacaccccatctatcgagatatgattattacgcattgcatgcttatgtcaaaatacctcgtgtaacccataaatatatatacacctactatgtacccacaaaaaatttttaaaaaaagaaacagagggcgacccacagatgtcattttgaattttctgacagtctcatgaaaagaagtaaaaaaaaaagaaactaattttaacaacacatcttgttgaacccagtgtatccaaactattatcatttcaatctgtagacaacataaaaattgaatggaattgtttacattctactattcgtatgaagtcttacaaatatgtcttttaccccttcagcgcttcttcatttggactagccactgcttttcataagtgcagtagccccgtgaggccagtggtcaccatgctggacactgcagtcatagaacagtgtccaggtagagcgtcccgatgagaattatttataagtcttgttaaaaatgcagatcccaggccccatattccagacagatagcgattgctgactggtgctttctcgtgcattatcttttttgtcttcctcaaatccttgggggcatcaggatagctactctcattttaataatggagaaactgaggtgccaatggaagcaacttgcatgcaatcaccatttttcaaattgtatatggagatagtttgtctatggtatatgaagaccatgccccatgtgacatatcatgtgagttcagcaataaccaaactggtctacacctgtggaatgatttgtgtctactgttccctgatcacacacttgagtgtcacagcaaggtactagaagagttttgaagcactcactctcaacttctgcacttgcccaagggtgaaaataacaattggtagcccagcactggtcccacggatcacactttgagtgtcacatcttgaaattacacagttgtgaagtggcaaacacaagattttttgtttgtcttacctggtttgttccattaaaaatatttaattaggctaggtgtggtggctcacacctgaaatcccagcaatttaggaggccaaggtgagaggattgctagaaccaggagtttgagaccagtctgggcaacacagtaggactctgtatctatgtatctacaaagtattaaaaaattagctgggttggtggtacacatctgtagtcccagctattcaggggctgaggtgggaagatggcttgagcccaggagttcaaggctatagtgagccatgattgtaccactgcactttagcctgggtgagagagagagaccctgtctctaaaaaattaaaaaaaaaattaattatggtataatatacatacagaaaagcataactcttgatgaatttttgaaaactggatacagtcatataatcaaaaaccaaaccattaccaggcccaaaacgttttcctcacactcccttgcaatcctacttgcctacccccatcagggatcacctctgtgtgacttttaacagcatagacgagttttgccagtttttgcactgtgtatcagtgaaatcctatgaaacgcgcttttttgtttctggtttctttctctcaacattatcattatgtccatgggattcatccatgttgtcatgggtagtagcaaataaggcattcccaggtacattcaacaatctcttgcagacaccgtactaggcaggtctgactccaaagcctgtactctatattctataccacattgcctggcctgttaacagtgcatcagttgaaaaatgaattcactcatccacttatttgctccttcacagtgtttcctgtgtactcctgtgttctaggccctgcactgtgtgctgctggagaggtgcccaactgaattcaagtcaggcctcatcctcaagtgacttccattcttgagagaggtaagccagctatatacacagctgacatcacttatcttccatcaagaatggccaaacccaggcagaaaaggaagcacaccaacttcccttcaaaaataagcaatttgctgttactggcaatggcaccaagtgttttggagagaaaagtgatttctctgtcctatattaaacagtagtggtgccgcatccttgaggagagaggtcagacggtgcccagagcagagtgtgcgcaggagggaggaaaaatgcagggagctgagggctttgggctttttttcaagcagcacctgagtgtgcatgtgcaccatgcaggtggctgctagcttcaggctgctctggtgggcctgtctacagcattccctctggtcacccctacccaccccactccttctcagaggcaagtgctacaggcatctatctgcctctctgtttgaggactttctccatgggtgcttgctgggaatgggggttaattaacaccccagccctgatgggagttgatgcatacattctccaggctccccttccttatacccctgcaagctccccctccttggtattcctgcagcatcccaatttccctgagaggctcagctccacttgcctctagaggcagctggtttgaaaacacagtgatgattggctactttcctttctcttccccactccatatctctttactggtgtttcttaaacttcttggcaaactgctcatattcaaatccccatctcagggtctgcatctgagaatgaccaaactaaggaaaaatgctcgtggaggtatctcaggagagagtgcaactgacatccgaaggacaatcctgagtcagaagaggaaagagtattctagcttctaggcagagggaaccgcgtaggcaaagatctgggatgggaaaaggtttggacagagcaaagcccagagccactgcagagcagtgagcaaatgggggcaaatggagttttcagcatgcaggtggattctggtttccactgtggcagaaaaggggagatgtacagacagttcagcctgtagccaccaaccccagtgcaccagtggagaggacgtgtgcttgcattctttgaaaattctgtccccgtccccctgcttggactggtggcaactacattgatatacagacactgggaggtaaaactcatgccttatttactagccaattcctttcctgcgctccaaattcaatccaaaagcaactcaatttccaccgagctgtcaatataatataccgcgctcttctgctctcctaacctttcctggtattacaggatcctcacttacttgtaatgaaacactatgaataaatcaatgtatgttaatatagcatgtcttcaattttttatgaagggcttcaccaaatctaattcccactgctttgtcagaaacagtctttgaaaaatttaacttgcaagtttcacgaagttagtgagggatcgggctggggagggaaagaagaaaggtgagaaaaatgggatgggagggagctgtggctgtaaacgtataatataatatgaaccttcatttataagcggggaaaacggaagatttgtagaatagcaaacataaaataaagggttagtagggggaagggtacacagctgcacatcaaccctgggctcctggcatgggttctggctgcaaaaagtactcaaggatgtcccccttctcttttagttgctgacagtaggatccacagccagaaaccaaagcaggtgcttcataacaaaaatcccaggctgagcacagtggctcgcacctgtaatcccagcactctgggaggctgaggcaggtggatcacctgaggtcgggagttcgagaccagcctgaccaacacagagaaaccccgtctctattaaaattacaaaaaattatccaggtgtggtggtgcatgcctgtaaccccagctactcgggaggctgaggcaggagaatcacttgaacctgggaggtggaggtagcagtgagcagagatggcgctactgcactccaacctggtcaacaagagtgaaactccctctcaacaacaacaacaatgacaaaatccaatcatgtcgtaagagcaatgctttcccagagctctcaggatgaagaatgtgtctctgtcatgtggtcttaatcagctcagtgcgtgagctggcctcgctcgtcctccccccagcaccccaagccttacttcagtactaaaaagagccatggtcttttctgccacaggaacttgcaccagctcttctgtcagcctgggccccgtcttccttcccatgcctccttgttgcctcattcatgactcctcacccttagcggacctcacttacagggactctttttatgggtatcttctctgactcccaggttcttattttacgtttccagagtcacctgtctctcttttgagccactaactttccatgtaaccatgtaattatttcatcaataagtcccttttctaccagcccaggagctgaaaaaatatgacttgcaagtcaaattcaatctaccatctgtttttgtaagtaaagttttattggaaaacagctacaccattgatttaaatatggacttatggctactctcacactacgaaagcagagagaagtagcaacagataccctacagcccacgctgcctaaaatatttattttctggcctttcatagaaaaagtttgcagacctctgtactagactttaagctccaaggaggcaaagatcgtatctggtgtttgttcaacatttcatccttttgcatgtctaaatgaataattaaattagctgtgtagcttgagggattgcttaacctctctgagcctcgagttcttcaagggaaaaattataattctaattttagtttccattttatgttgcagagtgacccccatttctttactcctggaagacaagccattgttttggaaggaaggctccagaatgtccatgagtggctttggcttctgtatcaaggcgcagtggctcatgtctgaaatcccagcactttgggaggctaaggcaggaggattatttgagcctaggagtttaagagcagcctgggcaaaacagcgagaccccatctctacaccaatttgttttaaaaaactagctgggcatggtgatgcacgcctgtagtcctagttacttgggaggctgaggcaggaggatcacttgagccctggaggtcgaggctgcagtgagccacaatcgcggcacagcattctagcctgggaaacagagtgagaccatgtctcaaagcaagcaagcaaacaaacaaacaaaacaaaaaagtttgaaggtcatagaaaagcaaagaaagaccaagaaatggtcacaggttgaggaacaaggagacatgacaacgaaatgctatgtgagagcctagaagaaaaaagaagacctctgtggaaaacctggagaaatctggaaaaaaaaaaaagtctggcatttaatcaataataatgcactgaagtgaattcttaattttaataaatataccatggctatgcaagatgttaacattagggaaagttgtatgaggggtataaaactctctctttttttttttttacagtttctctgtaaacttatttcaaaatcaattgtttaaaagacaacaaatggcatgctgagatttggctgctgtgagcatctttgtggctgcagaacagaacctaaacagatatccattgagctcttgactaggtgcttggccatgtactaagctctagagaatcctcaggaacctacaatttggtgagggagataggtatggcccacaggaataagcgggcaaggcacattaagagctctgttctgaaggaagggaagatggctcttatgagcatgtaacagagaaaacagattgagtctctggggccagatgccttcctcatagagtgtgaagctgttaaccagatgaggagcatgggagaagggtgggaggcatgacaggagatggtggagaatgaaagaagaaaaggctcttgggcaggacaactgcttgcctaagggatgcttttgtgcaaagtagaaaaggtgcctgtctcaactcagtctcagccccctgtacttcagtgagctgatgctgcctttgtgagaagaagaagatacgcttttcttggtgcccagtcatattcttcctggcagacacagcacagagtttaatggatttcatttccttggtagtgtgtctttgtgcagtgcacaaactaagcaacagtaggtggcatttctgctgagctcagattatggaagcctttaatgaactactcaagtgtatatattttatttcgagggtaatatagagccattaaaggagagggtaggccatcaagagagacacaggatcataccacagtgctactaaacgtgtggtttgcagataaacagcatcagcaccacctgggagcttgttagagctgcagattcatgagtctatcccagacctcctgatcagaatgtccggggctgaggcccagcactctgttgtttcataagctctccaggtgattctcatgcacactgagtttggagaaacactttctcaggcaaggggatggaggattgaaatgaccagaggaacaacaccggggtccctttggagggtctggctctcatgcagatgacaaatacaaagaaggccttgtttcaaccagaagcagaggagatggagaggtgacaacagtgactctgagagattctgagtcctggctggagaagaatgaggtccctagaaatgtaagaatgagacggagccaacacatggccccagacctgagcctcctaaggctgaaaaccactggggaagacctgcaagtatccttactggcctcgtgcttccaatgctgttaacattcatgaaggcaaagagtgtgggtctcagccagcgggagggaagaccactggctgacagtcttgcagagccagggctgaaactctgacccatcacttaccaagctttaagcgactgaagctctattttgtaccctcaccagccgaagggccctggagacaacagaacagagcagcaacgcctctgaacagcatctgccaggcttccctgctttccaaagccaagcttcagggtcagaggctcagcctgcaggcttggttggctgtgccggggcctgcccgggctgcacaccttccccagcactgccagcacagggacccatgcccgtggttcctggccgtatcagccctgctgcggccctgcaggggcttcctctagcctggtgcggactttcttggttaccatggatcaaagggctgttgtaggagtggggaagttaactcgtttgcccaacatggcttttgctgatttccaatcaatgccctgctctctgacttcagctgttttcctattggctgtgggatcaaacatagggagaaaacaaactcgaaatccagctggcccagggtccttagtattcaccatccatcaaccaaaatggagggttagttagtgggtgataataacaggaacaaacattatgtgcctaccatgcatatggctctcttccctgtgtcaccatcctgctccttagctaccagacacactttaggtgagtgtattcctgtcaacaggtgctccctccaccaacacctctggcccctccaatccttagcaccgggctgcttcccagactcattgccttccctcccctgcctcacatgagagggatattctgagattcactcttcccagctgccctaaatttcaaagaatgcagtcagagtcccatagcagggccaccatcaactcagacggctctaagctctttcttcctgaactaccataatgcagcctaataatatgaagcctcaacctcctttcagcttttagtctcatgctggggtgtcctgggtgctatgattttgttattttcacagaaaccttcttgtttaatgagtctgtctagcaatattcccaatggcttttagtctgtattgcaatacttcttgggtttctgaacatgagctgcttgccttccaacttcacactcagctgatttctgttctgctaagtttaacctggttaagttgctaagttgcatgaccaattcctctccagttggctttgggcatggagatgcaagaagttaaataatcccatgatcctgctcattggaaccctgcagccatactaacagcctttctggcagacaccgcctggaacaaatccttcattaagggcaaagcctagattctatttattgattgtaataattgccaagcacccagcttggcatagagaaggagtcaataaggtttaccaaatacatgaggattaagaatgaaaatgtaacaaatcctcaatgtggtacaactgggatttaaaatgaggtcattctgatcctgaagtccagtattctccgccccaccctgccaccttggccttggctcctctgtgcacatcctgtgtgaacagtttctagggagaggggctgattgaggggaggctgcaactgtcagaacacgaggctttgtagagggtctgtctgagcccaccccactcaggagggacttgccaagcaagcccagaagctgggtccatgcctgtccggcacagagttggtgctcagtaactatgtatttaataattaaggaggcccaaggtggtgaaggtcttgtatctgggcctgaatttctaaacctgtgtaagtagaaagtccttttggtgctttttagaaaatagcccatatcctttgacactgctttcattaaaaggtggtgtttatatcccctgactccccttaagtcttaggggacttgggactgctctcaccgatacaatgtaggggatgtgatattttgtgacttctaagattaggtcatgaaggcaatgtagtttctgacttgtccacagagactcttatgtctacagtgtctaagctgctgtataagaagtctaactcccctggggccgccatgtgtgagcaaacgcagggtgcatgacagtccctgtgtagatgctctagattgacagccccagctgagtccagtcatctgggcaacagacagctaagtgaggaggctgccgtgtgagtccagttctcggctctctggtcacccctggtcatttgagtcttctcagctgggaccctagacattgtggagctgaagcaaatcatccctgccctcttgcattcctgacccacagaatatgtaagcataataaagttgttgttttattccactaaattttggagtgatttgttaccagcagtagtaactagaacaccatttgttcattagacaagagtttcttaaagagcatcggcaatattttattctctttcatatccccaaaaggaaacagtaaatgcttaacaaatacatgctacattcttagccaaatgatgaatgtcaacaataccagtaatgagaaatatggacattcaggctgggcatcatagccagactccatctccacaaaaaattttttttaaaaaatagccaggcatggtggtgcatgcctgtagtcccagctactcgggaggctgaggctgggaggattgcgtgagccagggaggtcgaggctgcggttaggcaagactggtccactgcactccagcttcggtgacagagtgagaccctgtctctaaaaaacaaaagtaaaaaataaaaataaaaataaatatgtacatcatatgcctcttgatacgatgctctgagaaagggttatgtgtggtattttttgccaaaaatgcataatctcgatctaatcgtgagaaaacatcagaaagaaaaaaaaaactaacttaaaggacagtctacaaaataactgaccagtattcttcagaagtgtcaaggtcataaaatattaaaaaaataataaagactgaaaggctgaggagatgtcccagactggaggagactaaggaaaaaatgacaagtaagtgaaacacggataggatcctggactggaaaacgacattagtgggaagataagtgaaattcaaataaggcctgtagattatagtgttcattataatgtagcttaaagtatctatcaatgttaatttcctggtttcagtcactatcctgtggttatacaagatgctaacataaggggaagccaggtgatgggtatatagaaactccatactaatcttgcaacttttctgtaagtctaaaattattttaaaattaaatattgagccaggcgcggtggctcacgcctgtaatcctagcactttgggaggccaagggggacggatcatctggggtcaggagttcgagaccagcctggtcaacatggtgaaaccccgtctccaataaaaatacaaaagttagctaagcatggtggcgggcgcgggtaatcctagctacttgaggctgaggcaggagaatcacttgaatgcaggaggcagagactgcagtgagctgagatcacaccactgcactccagcctgggcgacagagcaagactccatttcagaaaaaaaaaaaaaaaaaaaaagaactaaatattttttttaaaaaaaagaacaaaaaatgtgcactaagtctcattgattggcaaatctgtaatcatggacccacaagttagaagccaaaggcacacccctccacccctcacattcttgcagcaatttattacaattatatatatatatatatatatatatatatattttttttttttttttttttttttttgagatggagttttcgctgttgtcgctcaggctggagtgcagtggtgtgatcttggctcaccgcaacctccgcctcccgggtacaagcaattctcctgcctcagcctcccgagtaagtgggattacaggcatgcacctccacccctggctaattttgtatttttagtagagacggggtttctccatgttggtcaggctggtttcaaactcctgacctcaggtgatcagcccgcctcggcctcccaaagtgctaggattacagccatgagtcaccgtgcccggcctattacaataatattaacaacacgagaggacatttaataccactcactagttgccaggtgccttgccaagcactttccacacattactcgtttaatcatcccacaagtttatgaggctactaccgttactattcccactttgcggatgagaaaactgagacttaaggggagcaacttcccagtgtcttcacagataggaagaggcagaggcaggcttggaaccccggcagtatgaatctagaatccacctgcttaaccttggagctcttttgtcatcatgaagagtggccagtcttacttccagggcctgggagaccaaaaacttttgctggaaatctcttaaaggatcagctagagtgcaaagacatgttaggagtatttggacaggcagagagagcttttgagtgcatcgttgggggcacagaggccaaaattaaggtgaaatggggtggaaataaatctggagaattaggggcgatcaggggacttgatgctagaatgcatttccaagcaccccagaggggttttctgaccacctgggaacttcctgcatcattgtcagaggccaagtcagggatcaggttgagaggcccttctaaggagaaatccatcgatcacgtaatcacacattctgggccagtgcggggctgaaggctgaagtttcactctattgcacttttctttcattcagcatttttctcatgaaattaaaatagaattgattttctcccccactaaattaggcattaggaaaggaacgaaagggagggcatgttggagactacaccatcaattcaatccagcagagtagcatttgtaagaaattgtattcgcccctacttactatgagaaggttttgtaaagcctatttttttttgttatatctccttcttactagaagagatgaacatttttttttctcccttcttggttaaaacgatcatttatactaaccttttctccaaccctctggcctcaggttagaagcttcctttttctaactttgcctctgtggtatttccccagaagcagacacacagcaggtgacactgctgtttatggaactgtcatttctgatgaaatgggtcatctggggactctacgttctcctattctgcagtgaccccaggctcatagctgggtccagagtggaacctcacagctggaaggaactactccatttacagagtgctgaaaggagatgggagcaggaggaaactgaggctcagagaggttaggaagcacacctaaggccccacagtaactggttctactcgaaggaggcagcgatgggataacaaaggagtcagaaaccttgggtacaaatcctgatgcttcctcttagcagatggtcatttatagctgcactgcccattagaaataggatgtgagccacatttgtgattttatattttctaggagccacatggggaaaaaaggcaaagagaagcaggtgggaattaatttcagtaatatactttctttaacccaaggtatccacaatgctattattccaacatgtattcaacacaaaattattgaggatattttacattctcttttcccactaagtgttcgaaacctgttgtgtattttatattctgaacatttctattccggctagccacattttgagtgtttaatagccacttgtagctagtagctagaccagggtttctcaatcatttttttctttactatcacctcctaagaaatgtatttagactttctgtgttgtacccctatgaattttaactctacagatgtggtgtatagttgtatatggacgctatgcatacctgcatggctgtatgtgggctttatgcgtattatgcatatgtgtatgaaaagggatttttccccaccctacccccaccactaccaccaagaaccaattttcatctcttggggtcgatggcacccctattaagcatgcatgatctagagcaggggtgtccggtcttttggattccccgggccacattggaagaagaagaattgtcttgggcaacacatgaaatacactcacactgacgatagctgatgagacaaaaaaaaaattaaaatcatgaaaaaatctcataatgttttaagaaagtttataaatttttgttgggctgtattcaaagccattttgggtcgcatgtagcctgtgggctcagggttggacaagcttcgtctagagcaagcagtaacggccctgagcctcaggtccttatctgtaaaataaggatgagtgtgtggactaaatgaggcagttcttgtgggaaagcatccagtggtgctgagtgtggcaccaatgctaatattggagttgcattgctgtttccaacacattcccttccacactgagtgccaggagtcaggtccccctcctcacctgcagccagttgccaggaagacgtgctctctgcccatgacttccctcctgctccaggggacttcccaaagccctcacagggtaaccaggggctctgtccttcagcctggccacaactcagcccagggcagcagggccttgtggaccaccttcttcaatgccttctctctcttagtggacacctaattaatgctgaaggtccagaggccacccttgagggtagcccaggtcccctgacacccaaaccaagcctctcttccctcccctgagtgcccattggcagatgggtggtgcccaggcttgttatctgtgcagagacacatgctccattttccaactcctcccagacccctgccccagtctaccccagacttgggaggttgctaactgtgtgctaagtggttttctccctcagcttctgagagattctggcacttgcttcgcttcccatctcgtggcttcccactggccagtagggtccatttctgcacctgtggctcccaagaagctctaccttgtcattgaccactctgccctctctgtccagttcttcttctgtcccgttcttcttctgtcccatctgagtgagacatgcccctacaagcaatgccaggggccatcaaggaatcatctggaacactttggagacaaggaactcagtccctcttactcacctgtgattctgccagtgggcagtgctgtaagaacatgagcactggagtcatagaagactgccttttctctctgcccctcttgtgattctagtggctacacggcacatgtgaggaagctgattgcgaaggctataaacttggtgtcctaagctggggattgcagagtaaaacccacgaagtgagcagcctgattgcccagccttctgcagtcacgcctcattaggcacccattggagggaaaagtcaaactaaaaaccagaaaagaaagtggctttgagacgttgcctttttttcccttaaaatgtacttcttggattgtgtttctttatagatgtaatccttctcccgcattttatttgggaaggggttcataataggaaggagttgttttgaattatatcagtaaatattcatggagaataaaaggaaatactttgggattataaaagacagtgtgaacctgattaacaatgtgaacttgatcttgggtgtgctgggctggttttaggctgtgatgcttagcacctgggtgaccttcaataatattcgattccatcatcaagaagaaaggtttttcatgaagttgaaatgtgtccatgtgtataagagagcttgaaaattcctagcacttgggagactgtcgagtaggtcagtcagacctgaatctacaacatcagagagggtgtttgatggtatttttggggaaaccacagactcattcatgtggagtcaataactatctcttgggcagtatcagtagctgttattttaggcacctgagatatgcccaggaacaaaccagtgaagacactgccttcctagagtttaccttctagttactaggaaggtgagaggaggggagaaaaatataatgaatgtaataaatatgccatttatttggtatgttagtagatgataagttctctagaaaacaaaagaaaaggaaggagacagcagagcagggtggggaggataggtgtgcatgagcaggtgatgcaggggtgagactgatcagcctcactgagaaagtgagatttcagcaaggacgtcatggaggtgagggaattagctaagtggatacccaagagaagagctttccaggagaggagagtgggagatggggtgaaaggggtgtgtgtgggtcacacagatctctgtgagtctttgaaagatttaggcatctagcctgggtggcatgggggctgctacaaattgtgagagccaggctgagacagacttcatggtgagaactggttgcaggactgaactcttcatcctgaaaggtaacagctccaactcagaccatagatgcaggatgcagggacccctgatctcctgaggctcttctacccaggctctgggtgctgcggacctgagaggacaagttggtgcaggagtcccacctccatgcttcctgggcccaggggatgctgcacagcccagtttctagacctttccttctggttcagctgcctgactcaacaacctcccaggaggcttccttcaggggctccttctgggtgagtgtggggaagaacaaggacatagattatgccctgggcaggaaaaatgaacacaaattcagggtattgaggaggcatctgagaagatgaccactgcgtacccagcatggccatcccaagctaaatctcaggagtgtggaccttgacttgaagacatcaaaggttattgtaagcagtgctctccgaaaatgggagttccctgagctttagcagatgtaccctccagctttagcatcccagggaccccgagatcttgaaacccattgcccttcaagtatggctgggagcgtagcaggctttcagagacaaggtaacccgctggggcaatatttaaagtcacacaaactctttacaaggtttacacctagaactctaggctcttattaagattcagagttcacaaatcccccaaatgtgaggaaagcaactcagagactctctccttggcatgttgaaggtgtgtaactaaaaggtgctgggtgtttcatgtaggaggtggaaagaatcattgcattgatttggatgaagcctccttcattgaaaaatatcaaaatttgcatgaaagacttttgctaaagtaatagcaattgaaatattctttgaagtgctctgaatataaatatagaaacgctcccatggagacctgctcatactggcttcttgccttatcgctgtctcactgggttcactgttagcctcagagggggttatacagtgtctcaaccatactgccttgggctgcctagcctgtgtgtgaggggtggaggagtcctgagtctggttcttttttttcttccctttcctttccttccttcctttcctttaccttttccccttccttcctcccttctttctccccttccctccttccttcctcccttctttctctccttccctccttccttccttccctccttccttccatccatccgtccgtccatcaatccatccatccatccatcctccctttctcactgtgttgcccagactggatctgaactcctgggctcaagcaatcctcccacctcagtctccagagtaattgggactacagtcatgtgtgccaccacgtctggcttggctctttcatttaatgacaaacattctaggggcccagattttgcctccaaagaataaataactcatgaaccgtgagagcactccaacaaatgagactgtaagagaaggaacgcactacctgtctccaaatctgggtgcatctggagaattttaataccctctctaccctgaacctatgcttcgcaggctacttctcccagctcctgaaccaccattgctgttatagagtcaatggtgctgtgggaacatattcaattgctaagagggctgaatatattaagccacaaaataaaaatgaaaggtgccagagctcaaaggcccagagatagtgggggccagagttagtcccattgcaggctgaagaacacatcctttgaagtgggtgacaggggagaaaatcaacacccaaacaaagagaaaagccagcgtgcagaaaggaggatggggcagacacacttaaggaagcaagaagcagagacaatggggaagagaaaaggaagagaagcctgggtatcgggtttccaattgtatgtccatgatgccaaatcatttttcatcccctgctcaagattttctgtaaggcaatttgagctattttgagggatgttgtgtttttagaaagtatatttccctgatgagaacatctcacctaagtgaacacctcatctggatcttcaatcttttccttgctctttcctcagcaaaatgccaagagatgctggctcccctagctcagtagctgccttcatgtcccctcctctctctgtgtccaggtccatgcttacccatcccaaatcctgtaacccgtgtgttatgagccatggattcatccaaagtgcagactccaaaccacactaactcatatgggtatctggtgctccccaaggcagcacagcttgtccaagaagtggaactgaatgtcaatgccttcatttcactgccatgtaactccctgggggaaacagcccaggaagcagctgtgtgggctgataagggcttctctgccttgtcggaatcctcaggcaccagctccagataacggccagcgacaggagtcagtacctgtgccaggtgtcaagccttccccttgagctacacaaactctcaggtataccatgctgccctgcctggacatgtccctggcagaggggtgggccttttcatcagaggacgggctacgtttttccttgctacactcaagaacggtaggagcccttactcacttcttgtcaaaagcaggaggcaactgtcttcagtgattaacaatgtaagccacttactagctttgagactttgggcaaggtgcttagcatcttggtaccctgattttctcttctgttaaatggagacaatgatgtccctttcttataggtcagaatggggaataactgagataatacttgtaaagcccctataacagtgcctggacataataagcactggataaacacaatctatccttactgttaagacattaaagttcttcaatagttttccattggtcttaggataaaagcaaccatctatactgtggcctgaagatcacacatggtcttgccctggttgctgttactcccacatcatctcactgattttgcactcaaaccacatttgcctcctccctaccccaggtactggccctacatctttcaccagaggttctggccatgctgttccctcactacagcatgattttccaccctctcttggtttggttaacacctcttccttcagttctgagctctattgttatttacttgggcaaaccttccctgctcaagtccaatgtgccacaatggcttttaaaggacaagaaccatgattttgcacaacttgcaggagcattgttcacactataacaatggggatggtgacctctggagtggtacagaacagcagccccatagggcagtggtttcagccagaggtaaaacctgaccatggggccaggatctgtaccactggtcggtgaaggaataaggacatccaaaaggcaccatcctgtgccaacattttctttgtgactcagagtcaaagcactgattatttggtcttatgtctcacattgcttcttctaccatcttcccactatcatcttaacatctgctgccaaagcaccacttacagagaacacactaagaaaaagcaactgacactctacttcaagccctctcctgcagctacttctgaagcaaatattactcatgcaatttcacatttatctgtttatctgattaatattttccactcagacaagactctaagcaacacacacaaaagggccatgttggctctggtgattgtagtatccttagcacctaaaacaaagagtagatcctcaatagatatttgttgcatgaataaataagctccagtttcagtgcccagggctgttctccagccccaaattgccaagcccagtgcctgaaattctaccactatatcatatatttgagcccagtccctggttcaagggaagaaatgttaagaacctcaactacactggctggtaatttcagaatcagtcctttcatcaagggggcattatcagttgtgtccaggtgagctgctaaattgtagtctttctacccctgtccagttgaactagggagtaagactggggtcaccttagagggatcatatggcaggtggttggggctgagtctccatgtaggttggtccagaatgtagtcaggacatcagcagttttagcaagacttctctactcctaggatgtttatgcagctagtcttcaggctattttgggtactggggggagagtggagtcaccctgtatcaagagactccaaacattccttacttccctaatatccaagatgtaataaaagcatgaagagtccaaccttcaaagatgagaagatccatcagcccttggctatgtttccaagtgaagggagacaattaaagacagaggagcaagacagttggtcagaaaataggggttctggactggagagtgactgttaaacagaagacagggttttcttaactcttttttttttttttttttttttgagatggagttttgctctgtcaccaaggctggagggcagtggcacaatcttggctcattgcaacctctgcctcctgggttcaagcgattctcctgtctcggcctcctaagtagctgggactataggcatgcaccaccatgcctagctaaatttgtatattttcagtagagatgcagtttcaccatgttggccaggctggtcttgaacttctggcctcaagtggtccacccacctcagcctcccaaagtgctgggattacaggcgtgagccactatgccaagccagggttttcccgattctgataaagggtttttaattcaatttagaggatatttgctaaagtttgaaagtccccccaaattcatacgttgaaacctaactctgaaaaagataatattaaaaggtgggacctttgggagggcagaactgtcaggaaaaggattagcgcccttataaaagagaccccagagagacacctttcctttttcaccatgtgaggatgcagcatgaagtttgccatctacgagaaagagaacccaccccagacacctaacttgctggcaatttaatcttggacctcccagcctccagaactgcaagaaaaaatttctgttctttataagttatcctgtgtgtggtattttgttacagccacctgaatggactaaaacaatgtctaactaaaatataacaaaacacagaggcttctgccacatcctaggcaggaagaaatgacagggatctcagtgaaatagggcctatggaggacacgcacattttgctgagtacctactgtgtgcctagcatttcactaggctctgcagtatacattgcgttatttactttgcagagtaacaccaggagtgaagtaccacccttccaactttactgctgaggagacaggctcagagagggtgagtgacttagtcaaggtcatggaactaatggtatgctgccaggctgggctctggcttctgttcaaagagtgacagccttgtaagtgtcaccaaaggaagcattttgaggacagagttgcagaactatcagttcataaatattcatttttaatccttattttcaggcagaagcttgtgctttctaaatatttagattttttatttgtaaactgacaggatcctatcattgacaagaactctcagagggaacagaatccactcctttttgattgtcacatccccaaatgacctgtctcccgcatggatgcatctaacagcctttgatgctagcagtggccagcagcagcaacctcagactataaatgaacctgttgataccaatatgaattcgcagttgtaataatagagattatggacatacatatagaggcgtctcattcgcaatgacttgaccctgaccacaattctgtgtagcatgcagaacggtgtgacaccatgtgcagggaggagaggaaagctgtggatataccaaaaccagagaatgaaaggtcagatttcacatgcacactgtttgagtccaagtccagctctccttgccctgtaccaccctacagttcatgaatcccagaatgggtcaccagtaagacctgcatcaggaaccacaggtcaaagatgccaatgaagcacctcacagcatgagtcatgcaggaaccaggcggagaacctgagctgaggccagagggtgctggggtggggtctgtcaccctgtttgggaactgggggctccagggaggtgggagcagagagggcaagtgacagtctaggaggcagaacaggtgcaagtcagcacctctaacccctaacatctaaataaaaaagcaatgacctcagtgtgtttcagcgtctgccagctgcagggaaatgtggcagtttccctgagcagagagcatcactgccatagcccatctgtctcactctcaacaccagctctttcttctcaagaacttttcagaggcagggtctgctgccctctgaggttcaaggaaaaggtcaggtgtggtctgtggacaaggggaaacctcattaaatcaagtgtcaaacgtaaaataaataaagccacacatttattagaagtaaatagctgtggctagttgtttgatctctggtctggactttttaaacacgcaagtaaatgaagaaaatgtaccttaataaacccagtgatagagtttaaaaatcatacggtaataatgttaaaacttacaatcaaataatattaaagggaaacaacaaaatgaaaaatacataaacatatatggcagagaacgtcaatattttcaaatatgaaaaagctcttacaaatcaataaaaaagaagaacatgcaaatagaaaaacaatgataaatgacatgaacaggaaattcaccaagatacatattaccaatggggggaaaagagattccacctcaccagaaatcaaatacttgcaagtttatattagatatctaggtttgcttttctaaacagtaaagataatttaaaatgataatacagagtgttgctggagtgagagtttcatgcattgctgatggggttttatatatcttttggggttaatctcatggctggaagcttcttacaagaagttagtaacaactagaatctgacacagagagcagaatcacagcaaaacaaaaccaataaccaaaaacaaaattatagaccagcatatcaactttaaaagaataatatactattacaaataagaatctattccagaaattccaccaggattattgtaattaacattcgaccaaagtaattacctttagccatagcttgaagttaatcccaaagactccaaaatgtatttgacaaaattcaatatcaatttctaaagaaaaagtaatgtatttgtaattggggtgtgtgtgtcggggggacagggaaagtctttcttaatggaaggggacagtcatgtctgtgttatatccaacaatcctttactgactgcccatcaggtggcaaggatacaaggaagagtgagacacagtctctgccctcagagaggttacattctactaggaaagacaaggggtgccacggtgtaaatttgaaccctactgaattcatgttcaaacttaattcccattgtggtggctctaggaggtgaggcctctggggaagtgattaaaccaggatggttttgccatcgtaaaaggctacagggaactagcttaggcccttttttgcccttcagccttctgccatatgaggacatggcattcaaagtgtcctcttggaagaagggactaggccctcaccagacaccaaacctgcccccctggatccgggcttcccagcctcctagaagtttgagaaatatatttctgttctttattaattacccagtccatggtattctgttataacagaacaaaggaactaagagaggtggtaaccaagtaaaccgataaataaatgagatatagatagatggatggatagataggcagattttctttatttaaacataaaaggaagtgaatgatagatgctatgaagaaaagcagggtgaaggcttatagaatgattgacagtcaatttcatttttagtagtgaaagtcaggacagtcccattaaagcaaaaaacaaagaagggggtgcctgctcagaacattagtgttcaacattgctatcagaatacaagcaatcagaattaaacaaacaaacaaccaccataaccaataaagcagcatgggaggatataaagatagcaaaattctttgggaaaaaaatgtggaagctctacaaattaaaatagttccagaatccaaaggctgaattttgccaacagcaaatgatcacagtggatggggaaaattgcatccccaattacgtgagaaaactgtgatgaacgggactaaaaagatacgagcttgccggatgaaagatggaaacgctccaccctgcaggggagaaatagcaatcctatgttcccacagcagaaaggagagacattctacagttgattcagtacaaaactgtctcagaaatgtcatcgggaaagaatcttctcacactggctgaccctcaccacactctcaagagtctcatattaaggaatactctccctgagagaacttctccaaagcatgttccctctccaggccacagctggttgcactctatgacagtgatcaatggctccattgcggagacatgtcttctgttccattcctgtgaccagacagtccagttgcctttctggaaaagaaatgccacagggctcctgaccacagcataacaggctctctggggagaagttcacagccagaccctaaccctcaccccaagaacctcaccctttccatggccccttctgaaagggaagattcaggaggtacaatggtgaaaagctcagacttgggtgttgggcggatatcagcagtgttcatgacatgaaatgggagtaagaagctcctaagcagattgaggcaaagaattccagacagaaggagcagctcaaggaaagatccccagccacaaaagcctggggagtacgaaaaaatggtgacaaattctgggtgatcgagtctatagtgggggagatgagcaagagtagtgaattggggtcagattgcaaagggtcttgaaaggcgcgataaggaagtcaagcttcacaaaactgtgggatgccagctgtggaattaaaccagagactgacgttatcatatttccccttttaaagaaagcacacacgggtgatagtttggatcgtgtaaagagaagctacatagaaagagagggagcaaggctgtcagatgcgtgtcttttggttcatattgcaattacctccgtcctttgataacttggataaatgccattttcaccactctgtttccttctcagcaaagcgatgcatttcacctgtgcttgaagaacctttgcagaaacattcaggggcaatagaagtcaggcactgggtggagttgcccacagaagagagaaaagcaagggagatctgcctgtgagcccaagtggacccctgagctcagggtacatgctaactccagaaatcctcaagtctaatgctcctccaacaagtggtttattcctagaaggtaaagatgcccaaaacgtggtggtccctctgggcaaacaccggtcattgcccctgattgcactcccccaacacaaatgtatgcatgcataaaccagtgttttgcaagctttaacttacgaccaaactgaactctgattcagtagattgggctggggcctgagattctgcatttcaaacacattcccaggagattctgatgctgttgttaattggtggatcctacatggtgtaacgaggttctaaacaccaatagactttcagctgcaagctctttgtctcaatttcaaagtaccactgacctcaacctaaaacctcaacctaacaaacgacctcaacctaaaatcctgtgcttccggttgtgagccttgtgactgtggaggagacatttcctagcgctgagcctcagttcgccacctctgtaaattgcctgtggaagacatggctttggaggacagaaaagaaaagtgaaggaagagaaagatgaagccagagtgaagtggtagcattagtgctgtgattcacaaaaataacactataggaagaacctggatgatagtattctgaatacagcaggagcaccaatagagtagcagtagtaaaaatagcatcattataactaatagtgcagaaatagtactaggggtcctacccagaggaggactgattatttcagaggcagaggttggggcagaatagaaggcttaacagatgtggtacatctcactggttgagaattcagattctggagccaaaccgacatttgatgaaatgaagtgtgtattgaaaacagcacagcaacccccacagagtaggggaaagaatgtaagatccccaaggagagggaccgtgatggtcttgctcagcattgcattcctggtgcctaggacagcgggaggcaccagataaacatctcttaaatatattaggagtctttgattctttttctgttctcagatacctactgactgtatgattctgagatcacacctctcttcttggcttcaattctttcatctcgaaaagtcaggatttgggctgtgtggcaccaaagatgctttccagttcctgtgttttctctcctgatgccctattttactcttcctttgcaacctgatagtatcttttttggttaattgttcactcattttctgtctccccactagaccgagttctccaatgtgggaatctaagttgccatcttgcacaaccctgtaatcccaaaacttggcacaaaacctgaggcatatctcagtgagtatctgtcgaatgaacaaaggaatgaacaagctctattttcttaagatcactggaggcagcattgtgccacggttaagatacgggctctaggttcagactgcctatatttgaatattgattcctccagttaccagttttatgacctgcaaattatttaacttcctgaggctcagtttcctcatctgtagagcgcagatactaatggtatccccttcacaggattttgaaatgattaaataattcatgcaaagctgttaaaatagttctgacatgtagtaagcattcaatacttatcagcctcatttagagaaaaaagaaattccttgtgaattccatgtgtaatttgacaggtgtgacactgactcaacttgctccagcaagtctccaaggcaaccattccccacttggtgcttctaccgtgcccccacagctccatttttgcacttggaatgctgcatttcgttttgaacatgtaagcctttgcttctgccttcaggtgctcaactctggcgtgcccagcctccccagtcttatgcctaccactccctccctcagtcttgctccacaaagtgcctctgtgccttggcatatgctgtcacctctgtctgtgatgaacttccaattttctacaactggccaacacctggtcattactcaagtcccgggtcaagcccctttattgcaggaagatttccctgaatctctaggctggtgaaatgcatgacaaagttctattcatttccctgcagcaatagagaaatcccaactgtttaatcataacagaagaggaaaacaaagaaaaatgagtgggagtgccttggtataactatgacaccctaatcatcatctcatggggagaccctagaacaaccagactcaaatttgaggcatccagtgcatgcttcccagagcctctcactcttacttttcctagaggcacctgagcctgtggagggcagcaggagctcggtctccagctccaccccttctccacattcctacaaaggagttatatgccaggtacctcctttctcggccttggccctggccgggtgattgggaaaatgaaacagactggccgaggcttgatgcccctaaattgtaatttcaaggtaatttgaacttccttcttcttgggcatgaatggaaaagctaaagtctccttgaatcagtgtgcagaactcaacaaagaattaaagtgcccccatgctttcctccaaagcttgtgtgagatcagcaggataatcaattttacaattctgtgaagctgattggaaagtgattacaaaggcagtcagagcattttctcatgggctttcaaaaggcctgttgcagagggacgtgaaggatatgaagtctggccatccatagcaagcccacaaaaatcaaggactccttcactcccaaagctttaatctctggctcccatgagttcgatagtcaatcctgcccaaggcctatagagtaaacgtgtgaggctggtagtccactaagaacctaagccctatttcagtagatagctttggggtcagaatgctactgcaggctgatttttaaaaaccttgaacttcagtgttgccctctgctgcatcctgcctcagtttccttatcccactctctctagctccctgtggagactggatccctgatctaaatcacgctgccaccttctccatgtgctggagcactgtctcctaaaatggccagctttctggcaccgagatgcattaggcactgactggtaggctatgcagagatcaggtttagcccacactcactgtcctgcctcagatgtggaacaacctgggccttccctccatgcactcctcacttcccttagccccaggcctgcctggcctggttggtttcagatagttccccttctcataagcctttgggtctgagaactggaacagagaatgtgtctccctcccagacattgggccccaatcggaatggggaagatggtcacacagcaagaaacagagaagccccaggaaagggctgccaaaggggaaagaaaatgagcctgcttggtcctacggctcttagcgtagctttgcattgcacttatcatgctgtcttgagcgtgtttttgttctcccattggactctgagctccccgacagtagggtgtgtttctaattcattttgatatcatagattattaccttaattggctcatggaggtatgttagtgtgttagtccgtttttgcattgctataaagaaatacctaaaactgggtaattgataaagaaagaggtttacttgttcacagttctgcaggctgtacaggaagcatgatgttgccatctgctcggcttctggggaggcctcaggaaacttacaatcatggtggatggcaaaggaggagcaggcacatttcacatggtgggagtgggagtaagggagggaggtgctacacacttttaaacaaccagatctcacgagaactcactatcgggacaacagcaccaaggggatgtggtgttaaacgatgagaaactgcccccatgatccaatcaccttccaccaggccctacctccctacctccagcattggggattacatttcaacaggagatttgggtggggacacagattcaaaccttattgggggccttttagattcattgtagggtgatacttttgagccctttgaagttaggtatggccagatgacttgtattggacaacaaaacgtgagcagaagtgacctgtttttatccaggtaagtgctttaagagccaaagcccaatttgccgctttctattttccctctgacatgatgactagcaacgttcagcttggtggcagctccgtcagcccgggtccctgtgtgactgctccctgttgacccatgatggacgtgtcatacaggtgagaagtaaacatttgatgttttaacatatagtgtgggtgaaagataagcttttgatgtttgatgtttaacttttgagatttgggaatttgttattgaggtgtaatctagcctaacctgacagatacagtgctcaatatatgttttagggtgagtgaaaggaagggaaggaggagtggaagaaaaggagggagggaaaatgggggaagaagggaagggagaagaaaagagaaggagggagaaatatgtaaatgacccgattagtcttcacctctctttgggtctgtttccaacttagacatctgggaaataatgttcatctttactgtgttcccttctaccttcaacacagaaaacctgatacgattcagacacaaactccatgcctttttttgtataaaagaaaattctattttctcaaatctaatgtgtaacatagcgatatttatagagaaaggtggcagagaaatgaggcaggaaacaaagcaattgtgacttttttgggtaatatatccaagccataaagatttcattagattccataatacattgctaatgaaaaataagaccctttcctattttacctactttctgaacattagaatcaacttggctttccaagctttgcaccccatttacattaattagaaagttccatattaaggaaagcttttaatgggctgttattgcaaatgattttactggtgagctgcattgttctgtttaatagcacatacaatggcatctatagaggagactttgataaaattgaagttttgatggactctgggcctgagctagcctttgctgagaggatggagttcggggatattttcctactgagggaaatggctcttctctttccctggactagagccagttctaaagcatccacatgtttctgatcccaggagaaatccacactgccttctgcctgggtacaccattggcagactgcttccagatccctgtacatcacttggcaatatctctcataggtgttcatggacaagacagagccgtcctggaactgagacataagggatgaatttcataaacacagactgcctgggccaggtggagagtgtcatggagatgggtgctaggtccgtgcaggaaaacagggggagaagggggacaaagcagaataaataatggctgcacataatagcaattgacacagagagtaaggtggggaacagggagaatcggggtatggtggggggtgtaagaggaaccagagcatgctgtcatggcatggagaaccctataggacggtaaccacttttccatttgtctttgtccctatccatgccctgcataaatggtgccacccataggtggtcactattgctcctgaaggttttccttggtcttggcttccagctgcctactactgataggatctccaactatcactatagcatgagaataaagtattcagaaggcagtgcagtatggaatttaggtgtctgagctctgcaattacatctgggtttacatcctacctctcctgctaaataataagtgtaatattctgggccaagttagttaatctctctaaacctcagtttcctcaatttaaaaatgaatctgcctgaagacttcctggtatctaaagtgcactcaatacatgtgagcaattataagtttcattaaataaatttgagtggtttaaaacactgagacttcgggcagagcacaggacttctgaaattatagttacactggtggagttatggaatacaggtcctcagatctcagtgacccgtgaatggtgaattcagcagacatttttgagggtagacattctggcttccctggtgcctggactggatgctgtgatccatggcttatgtgactgtgagtaccatgggctcatgggtttttattcttgccatgctggcagaaggacactgctaagcagggatagacaaaaaaaaaaaacaactatttgaatggaccaacctggctgataaccttgaagcagtctcaccaagagggcttctagtataaatgggaggacaggagaatggccaactagttgaattcagagagtagagagagaagactagtctcaggccactgattctgcagtgtttgataagtggtaagaacccattagagttggttaccattacagctataataggaaaatacaggaataatgcaagcatattatattttgtcccctaagaatgggggaaaataccactatatcatgtgtagggccaaggcttaccctgctgtcagagcccatttagcatcttgaatttagttctagatgtgacatcttgagtttagctacagacccacacctcatctccatcagggagataaagtggtgagtgacgcagactttatgccccacaaagaataattgaaaggattctccagaagagaaaaagttattgctaggtgatgttggttgcattctagtaatcaaacagcagctgattttacgacggattatatgtattctttctaagtaggatatgtgggtagatggggtagggacgtagagacgacaatatggatggaagatttatcaatataagtttgacacagggcacatggtccaaatcaggtgaataccttgcaatgttgtgagttcctgtcactgtggggcttcacgttaaatgtggactcatccatcaaatgcatatggaccatgcactagtacagggtcagtgatactagctgggaacacaaagattaatacaatgtggctcttgctttatagtaattcactcttctgtgaagaacacagacccattaacaaattcttaaataaccactgtgtcacacataccagtgtagaaatgtgtacaaggttgtgtcaaagcaaagaagtgacggcagtggggaaggaggcaaatgtgaggtcagaaggtggctgatccttgaggatgaatcggtaggattctgatgggtggacaagggtgcgagggtgtttccatctaaggaaacaacatccaaaatggcttgaagaatagaccccattttctttatcgattcattcaccagtgggcatttaggtggcttcgatgtcttggctattgtaaatcatgttgcaatgaatatgggaatgcagatatctctttgagattctaacttcaattcttttgggtatatatccagaagtgagattgctgggtcacatggtaattctatttttaatcttttgagagaactccatactattttttcatagctccattttacatctccaccaacagtgtgcaagttttccacatccttaccaacacttatctttttgtttttaaaataatagctatcctagccagtgtgtgatatctcactgtggttttgatttgcacttccatgatgattagtgatgtttagaatcttttcatgtacttgttgtccatttgaatgtctttggagaaatgttgattcaagttctttgccccctttccaatcaggttatttgttttcttggtattgacttatatgagttccttatataatttggatgttacatttatcaggtatatggtatgcaaatattttcttccattctgtaggctgtctcttcattatgctgcttgttgcctttgctgtgcaaaaccttgtagtttgatgtgattccaatggcctatttttacttttgttgtttatgcttttaatgttatatccaaaaatcatcgcccagaccaatgtcatggagctttccccctatttcttctaggtgtcttacagcagtagatgtgagagatatttaattaatattagtacattaaatctttaatccatattactcagcctcaaaataaaaaaggaagtcttgccgtatgtgacaacatagatgaacctggagggcattatgctaagtgaaataagcaagtcatagaaggacaaatactgcatgattccacttatatgaagtatctaaactagccaaatcataggcacagggatagaatggtggttgctaggtgctgggtagagggaggacatgatttgctgttcaacagctataaagtttcagttatatgaggtaaatacattctggagatctgatatacaaggctgtacttacatttcatagtactgtgtttcacagtgtattagtctgttctcatgctaataaagacatacctgagacttggttatttataaagaaaaagaggtttaatggactcacagttccacatggctgaggaggcctcacaatcatggtggaaggcaaggaggagcaaagtcaagtcttacatggcagcaggcaagagagcttgtgcagggggaactcccatttataaaaccatcagctctactaattcactaccatgagaacagtatgggagaaaccacccccacgattcaattatccccacctgcccccctccatggacatgtggggattattacaattcaaggtgagatttagatgggacatagcaagaccatatcagaaggttaaaagtttgctaagagtagagatctcatgctaagttttcttatcacaatataaataaaataaatagatacctttgtcctaaaataaacaaactaaaacatgtgactctatgccatgcatacacatatataaagctttgaataaacaaaaacactgttattttactcacacacacgatgttgaaaaggcatgattatatgaaaagcatgcaggacatcatcagaagtttggcactgtgagagcacaggatgtaaaaggtaaggtctaagagaaatggggctggagaggtgagccaaaatcccattttagagcctgaattttagaaacccgtgggactaataaaaggtattatacagagagtgacagggttagattttgtctttggctttagtggtataattgaaaaactgtcccaggagtttaaaaaagaaaatacggggacctaactaaaaatggaggtaaaactgagagaatttgaagatcctctggaggtacaggatgagggatggtcttaggacaggctggctctcaaatttttaggggaacagccactggggatacctgagaggagtggaactggacaaaccaaagggaagagggacctttcatttttggacatctatggtatgcttgacattgcttctatctttcataccttcataacgatcctgcaaagtaagaattattatcttcttgggaggctgaggcaggtggatcacgaggtcgtgagttcaagaccagcctggccaagatggtgaaaccctgtctctactaaaaatacaaaaattatctgggcgtggtggtggacgcctgtaatcccagctatttgggaggctgaggcaaagaattgcttgaacccaggaggcggaagttgcagtgagccgagattgtgccactgcattccagcctgggcgacagagtgagactccgtctcaaacaaacaaacaaaaaaaaagaattattatcttcattacatatgagaaaattgaagctgttttatgtgtccaagatcacaagatcatatagctgagaccaaatgtgacccataattgtctgcattctgaaacctatgattttcccactagatcctctaagttcctttttttgctccagatttcaggattctaagcacacaaattaatttttatctgttcgaaattgaaataaggcaagtcttagtggaaatgatctgactttataccaagcctggttatatactctcttcatattaaacatattcatacagaggataagcggtacctataaatatcattccaataaaaatgaggccatgtattcctgagtggtaatacgctgcttgggtcagtgatataaaccaggaggctgaaggccaaacaactttaaccagcccagagattcaataagttaaaatatgttttggaagacagctttaggccagacctgctttttttcttgacaattatatgaagacaccttattcagcacaagcaggctggctacagggtgtgaatttttgtttaaaggggcagcaacaagtcatacaggcaacagtgatttgaattttaacttcagaagtagaggtgggtaaccatggtctttttgttgttgttgtcgtcgtcatttgttttgtgttattatttgaaaatccgtatccacaaaaatctcactaacagattgtttccttctcctgaaatgctctcccgactccaacactttttaatctggaaacttcctatagggcaaattttagcttcttaattgggggagattttgccttccaaggaacacttatttgaatatacctacagacaattttggttgtcacaacttgtgtatgtgtgggtaaaggacctctaaaagttagagttcagggatgctaatattctttttttttttttttttgagatgaagtctcgccctgtcgcccagactgcagtgcaatggcgcaatcttggctcactgaaacccctacctcctgggttcaaattattctcctgcctcagcctcctgagtggctgggattgcaggcgcccaccactaagtccagctattttttgtatttttagcagagacagggtttcaccatgttggccaggctcgtctcgaactcctgacctcgtgatcccccaccttggcctcccaaagtgctgggattacaggcgtgagtcaccacgcctggcccagggatgctaacattcttcagtgcataggacagtccccaaaataaagacttacccagtccaaaacattaatagtgctaaggttaagaaacgtgatatagcaataccattcaggacataggcatgggcaaggacttcatgtctgaaacaccaaaagcaatgacaacaaaaaccaaaattgacaaatgggatctaattaaactaaagagcttctgcacagcaaaagaaactatcatcagagtgaacaggcaacctacagaatgggagaaaatttttgcaacctactcatctgacaaagcgctaatatccagaatctacaaagcacttaaacaaatttacaagaaaaaaacaaacaaccccatcaaaaagtgagcaagggatatgaacagacacttctcaaaagaagacatttatgcagccaacaggcacatgaaaaaatgctcatcatcactggccatcagagaaatgcaaatcaaaaccacaatgagataccatctcacaccagttagaatggcgattattaaaaagtcaggcaacaacaggtgctggagaggatgtggagaaataggaacacttttacacgttggtgggactgtaaactagttcaaccattgtggaagacagtgtggcgactcctcaaggatctagaactagaaataccatttgacccagccatcccattactgggtatatacccaaaggattataaatcatgctgctataaagacgcatgcacacatatgtttactgcagcactattcactatggcaaagacttggaaccaacccaaatgtccatcaatgatagactggattaagaaaatgtggcacataatacaccgtggaatactatgcagccataagaaatgatgagttcatgtcctttgtagagacatggatgaagctggaaaccatcattctcagcaaactatcgcaaggacaaaaaaccaaacactgcatgttctcactcataggtgggaattgaacaatgagaacactcggacacaggaaggggaacatcacacactggggcctgtcgtggggtgaggggaggggggagggatagcattaggagatatatctaatgtaaatgacgagttaatgggtgcagcacaccaacatggcacgtgtatacatatgtaactaacctgcacgttgtgcacatgtatcctagaacttaaagtataaaaaaaaaaagaaacgtgatatagggtcttatctgattctcaaggtaaattaggtcctccacgatttatgttttcacagcaaactaaattcttctttcacagcacacatcacatgttgagagacatgttatttgtatgattactgctatggtttgaatgtgttcccccaaaaccatatattggaaacttattacccttgcagcagtgttgggaggtggggcctaatgggaggtgtttaggtcatgaggtgtctatccttttgaatggattaatgttgattataaaagcacttgaggcaaggcatggtgtctcaggcctctaatcccagaactttgggaggacaaggcgagagacttcttgcttgagtctaggagtttgagaccagcctgggcaacacaatgagaccctgtcaccacaaaaaaattaagaaatacagctgggcatggtggtacatgcttgtagtcccagctactccagaggttaaggcaggaggattgcttgagcccaggatgctgaggctgaagtgagccatgattacaccactgcattccagcctgggaaacagagcaaaaccctgtcaaaaaaaaaaaaaaaaagaaagaaagccttgaggctgccagtttaactcttctctctgtctctctctctcttcctttgcccttctaccataagatgacacagcaagaaggcgctaaactgtgacctaataaatttctcttcattataaattagtcagtctgtggtattcggttatatcagcacagtatggacttatacagccatctaatagctttcttccctatgcaacggactctaggagggtgaggaacagcattcaattttctcccaattgtatcctcagcagctagtataatacttggcacatattaggtgaaaccctgtcactacaaaaaattaaaaagttctgggcatgtaatcagtaaagacttgtgaatgaatcaacacgtagtaaaagagagaatgcaatcagtcaatacattatgcttatgaaattacatctctacttcagttgaaaaaattgatgaaaaatataaattgattgattaattgattaaggaaagtataaaccaggaatcatttgtcaccatggtgctgcagacccacacagtactaacattaaccaaagtaaatgccagcttccattaaccaacgtaaatgtcagtggtagtcagctcccaagatggtccccaaccatccctacctcctgttattcacatccagatgtagtactctgctacttccaaggctagttcatgaaatgtattataatttctttcccttttctcttggctcacttactctagtgaaagccatgtgccatgtcataacatactgaggcctctgacaatagctgtgtgagtacaccatattggaagtggatcccccagtcccagtccaaccttcagatgactgtagccccagctgacatctcaactgcaactttaagagagaccctgggccagaaccataagctaagtcactctaagattcctgactctcacaaactgtttaagataataaatatctgttaagtggtaggaaatttaaatttaaccaaagaacaggaactttcttgagtaccgaccgagaggctggcaggtaggactaagaaattaggttatggagtcagaattgagtttgcaaccttattttatttaggtttactccgatgttataactgaccctgaccaagttacttaggtcttttcattgcttttaaaatcagaataatatctacttttaagggccacaattaaacacaaattgagtaatatgtagtggggtgagttattaatgaattaagaggtatttgagaattttttagaggaaagagggaggagcgtggctaggaactctttaaaatgagaattaaaaagcaaatgtccttttcattgtgagttctgggcttgcttgtccaggtaggaattaagagttcacttttcagatccctcgactacacctcacaggaaaggaggaggagacttttgtgcttcagcagcaagagaagaggggcatggcttgattctgaacacaagtgtagaagtctgaaaagctggaggaggattacctgagttgcaagaacccagacatggtcccctgatgtcacaatctgaacacataacatggcagcctcaggaactggagccatagccaatgtcctggcggccaaacttagtgtgtggggcacggacactaccagcaaaggttccagggcacctcaggcctggacgactcccatcacagaggcaacctggagggaccaaagaccagcgattcttcttggacttcctgtagtgatagggtacgccacagttttttgtttgttcgtttgtttttaaagcctaaagagcgggaggaagggaatgcaacaatgatagagcttggatgagccactagccacaatggtgaaagacaagatgttttattaaattcatcaaaatagaagaaacctgattatgtcttgcccctggtgtcatccagcaagtcctacatactgaaaacagatgtaaatgctctgtcctataactaaatgctattggatttccttttctttcagatgccgagcataagcaagttaatcattgatgatactgtctaggttctccccaacagaagagcttctaatgtcggatgccctacaggagtcaacaacattgccacgggctctattttcctccctgccatgatgggcaatggccagagaggggtgcactgtccttgccaccacactgtactgctgcacccacctgccccaagccctcccttgttctatcccactgttatacctgatgccaactccctacctcacagttaatttgtctcctacaagcctgtgttttccctcatgtcttgcttctatttcagctaattccaggaaaaaatgttacttaaactcactcagttctaacacatatgaacatttcctgccctaccttttctcagaccttgcatgaaatgtctttgtttcctccctctattctgtaagtcaactaagaacctgaaaggtaagagggctattagcatacatcaggaaaaatgggaaaaaagtaaaataataggttttgataagaaaatagaggctgacattttcctctactgaagggcgtttgctttactaatctttcttttggtatttctcaaaaaaaaaaatccatttcatttttcttaccttaacccacatatttatctttctttttaaaaaaataactgccattttgcaatgacctacagttcacttggcttggcataggaagaagtgaggagctacagagtcaggcagaactagctttggttcctagaaaagattgcaacataatcacagctgcttagttctacccctatcttcagagatttatggcttcacagtataaggattggaaaagcctgcccgggccctgaaaactcagagggagtatcatccatatgcaagaaactttgaacagctttcagaaggtggaattcacatggaaaaggacagaaaagggcatgggtggtgcagggaagaaaagatttctttcctcatcggttgctaggttcatggctgaggcacctaaaacaaaagacagattaacaagagaaaagcatacgcatctatttaatacatgttttacacaacaaggaagtcttcagaaaagaaggcccaaagaaagaggaaaatctgattttttttaatgcttacatttgatgaagagtggacagttgtgccaaaatataattggaaaaagtggggattgtctaatggtgataaactgaagggaatttagcaagatctattttgtaacgattcttctccatccccctgtgtcttcagagataaggacgttcctctcctctgggaataggaagggcacctctggaataagggtcttaggactttcttcaggggagaaggctgggggaaggtgagatatcctcctacttctgctgtctacccaaatgccaaggtgccatatttgggggtagcatgttctgaaccccatcgattgtgaagtcagtaaatccatcttcattgtaaccctttttaaaatatgcatgtatattagggaataatttgaacataacacaaatgtttgattatgcctcatttcacaggagagaaaagcaggtgactggagaaaactgcactcagatgaaccaaccacgaaggaatacacaaaatgtatgcactcatacacctcaaacatctgcttccccactcagattacagtgtgtgtcagccacatctggggttccaactttccctcccatttcagacgatcttccatacaccatttctcaataacacacaagttggaatctgatgcccacttacacacagactgcatctctttcaaagtaaagtaccatatttattgtagtatttatgtattccttagctatttaacatgtctaaaactgagctaagatttttcctaggttcctattgtttgggtcactgataaagtttttaaatattgtatcctaacttcattcttcctataagccctgtaatttttagtgtgcaattttacatatcgtggcgatatttaggaatgtataggtcacatgacatcagaactgactgtattcgcaagcgttgggtgagtaaagagggtagatatcaacagaattgcatggaagagtcagggaagactacggcttcctatattcccgaatacaacctgcaagatgcccagtaaggcaggattgtccaaaacaaataaggaggaaggtaaaaatgcacaaagtctatgaagatgtgacaggtcttttttttttttttttaattttactacttgatggatatgccttcaaaaatggtgaaaatgtgtatcttccttagcagaagacacacttgtctatgtaatatccatctctctccccggccctcttcttcacttctggcaaacactgatttgcgtggtatttactctttaatgtggctatgcattcatcaaaggagatccccctttatcccatctcaaggtttattccacctcgagaataaatattgaagaatctcagtcaatcatgataactattttcttcaccagtgatcggttaacctatgggcatgggacctcattcttgccaatgaaacgtgagcagaaatttacattgtgcatctgggaatatttgcttaagagattcttaggaagggatgtccccaggtccacaggaaatgtctgagggcatggcagctatcttctgaccaagaggacggccagcctaaagacaaagcccacacactggggttgacagagcagaaaaacctgagtcaatcatgatgtttttaaaataatgaattaagcaattccgcagcttaggatatgattggataccttgttatatgatgtgacacattttccatatggtataagtcattttgagttggctttgttacttagagctgattattttactatttgtttagcaatactactttcagaagaatcaaaactatgagcaaagagtgacataaaggggaattcattgaatcattatttgttcagtgcaataatgaacaactagaaaaaactaaatacccaagatgagggagctggctaaatagattgagcccattttacagaatcctctgaaaccattaaaatgaaggtgatataaatgtaatatacattgatattgagaaatgttcaaaatgttcttgcccctcttgctcatttaagtcatttgtcacagtattaactctgctgaagcccatattttctgcctactccgagtctgctggacaagtgtgaggaaagcagtgacccatgctaactggtctcgttgtaactcctgtctgctaacctcaagtgctcccttggtatttcctggtgatcctttacatttccccatttcagtctcattttcagactcccacactgtttcctactttatggagtctcttcaaacctccaacacctccacgctctcctcactcttagctgataaccctgcttcctgtttcatagagaaaatggaagttccatggtgagaacacggcacatgtcagcttaactgacccatccccatacattctgtcttccctcctttttctacagcagaaggacctatgccgcatctaagaccaactcttctatgtgtgagtgagaccccctgtgctctcatttaccaaacgtcatcccaagagcagtgtccatcctctttggggctttttccctttccattggatcatttccctttagttctaatatttctcaaattttataaaataccaacaactccccaccttttgatcagagaacatcttcaggtactgtctcctgtctctgccttctttgtatctttctatacaattcctctcctgctgctctcccttgggcctgtgtaatcagatttcagtacccacaattctttataaattgctaatgttaactcaccaatgacctctctgttgctgcatctaatggtcaattctcagtccttattttacctgaactaccaacagcatttgacacagtggatcaccttctccttttgttctttttttattacttggcttcctggaccctgccctcatttttcttcttacttcattggctgatacttctgtctcatttgatgattctgcctcaaattttccaccttaaaaatccaagggtcccaaagcttagcactagaatctccctattctacctacactgagaccctttcacctcctccagctttacgtctgcaaagctcgtgcataggctgactcccctgctaacatctccgtcctctacttctcccctgaactccagactggcatatctgtctacttgatatctcacccaaaatatccaacaggaatccatctgaaacttaacagatgccaaacctaaatcccaatctttctctgaaacctgctcattccagtgtctttcctatctcagttaatagcaactccatccttccatttgctcagtctaaaatacctggggtcatttttgattcctctctttctttcacatcccaaacctactttgctaccaaattccattggctttatcttaaaactacatctagaattctactacttctcatcactccctcctactttggtctgagcctccaccatctctcacctgcattattaaaatgcctgctcagcagcctctctacttctatccttgccttcctttagcttgttgtcagcagagcagacaacatgatccatttaaacaaaaagccaaattagtttcttccactctttcccttactcactctattccaaccacactggcttggaacacgctaaccagtctctcccgtgaggccctttgcactttcttttttgtttgagacgcagtcttgctctgttgcttaggctatagtgcagtggtgtgatcccagctcactgcaacctctgcctcccgggttcaagtgattctcctgcctcagcctcctgagtagctgggattacaggcacccaacaccatgctcagctaatttttgcatttttagtagagacggggtttcaccatgttggccaggctggaactcctgacctcatggttatctgcccaccttggccccccaaagtgctgggactataggcgtgagccactgagcccggtcactttgcactttctgttctcactgcctggaacagccttcctccagacagaaatttgccttccctcaggtctctgttcaaatgccacctttaaagccaggtctttcattgaaaataaaatgtccctcccacacaggtggccagtacaccctgtccccattatcctgcttttttttacctgacagcattattgccgtctgatttactatatattcatttactatctgtcgcactcaactagaacataagctccagtgagatggtgtcagttttcccactgtcatttcagtgcctggaaaaatgctagacctacgatgcgtattcatgtgtttggtgaataaatgaaaatattgcgttaattaaaatgcacacaggttataaacaattttttgtttttgtgaaacaaatctctaggaaagccaatagttactggatatgtaatttttttgtcaacttttattttggaatcaggggtacatgtgccagtttgttacaaaggtatactgcgtgatgctgagggttggataccaatgaatctgtcacccaggtagtgagtgtagtacccaataggtagtttttcagcccttgctaccaccctccattctcccttcccctctagaaattcccagtgtctttgttcccatctttatgtccatgtgtactcaatgtttagctcccatttataagtgagaacattttctgtttctgtgttagtttaagttaacggctttcagttgcatccatgttgtgacaaagcacatgatttcatttctttttcgggtctgcataatattccagggtgtatatgtaacacattgctttatttgatcctccattaatgagcacctgggttgattccaggtctttgctattgtgactagtgctgtgatgaacatacatcacaggtgtctttttggcagaatgatttattttcctttgagtatatacccagtagtgggattgctgggtcaaatggtagttcaactcttggttcgttgagaaatctccaaactgctctccacagtggctggactaattttaatttccactaacagtagacacttactttgtaccagtcattttcttgggcaatttcttatgtcatcaaaatcataactattcaaagaaataggcacctagtatctccactgtaaatttgaggaaactgaggcttgaaaaatgtagttaacatactttgtattaaataactagaaagtagcagaggtagtatctggtttgatgatctattgtctgtggtatactacctcaaggtatgtgtgtctgttccacaaaaaaaattgtaaaaaaaaatacatacatgagaggatcattccttaataaaacaatagattaaaaggaataaccaatagatgtgtacaaatctgattaaactaatggttaataaaatgaaataaattaaaatggtatgggtttttttctattctattggcaaaaatatcaagcagcagtagccataatgtattaacaaaataatcatttacatgtgggaagatttatgtgcaaggattttcattacagcattgagcataacagccaaaaattatctaaaaacaggagcaggttaaataaagtatgtacatctcaaagatggagtactatatcgtcattaaatgatgcaaaatattatttgagatgtgaaaatgatgagtgtattatttcatgaaatatgcaggctacaaaatagcatgtatatcagaattcaaatggcgcatcgacaagaacaaaatctctttgtatatgtcttgatctgaatattaaaattctggaaggaagtcatctttaataacaataattacctcctcacagagactctatgtgtaataattttccattttaaatttatgtattttttaatttaaaaaaacatagggctgaatcaggtatctattggtactccaacatttagtggcttaaaacaacaataattgattatttcttatagttttctgagttagcaacctgagctgttctgctagaactgctcgatgtcattcaagtagccatagtcatctaagctcagctgaggctgcatgttccaagatggcctcactcatacaactggcagttggtcctgactgttggttaggacactgattctcttcatttaatttctcattttccaggagaccagactgagtttcttcacagaaaggtggccccagacactgggagggcaagagcaaacattcctagtcagtcaaggcgtttgaaaacctcatttctagacttgcacatcatcacttctaccactttctattagtcaaaaagattcacagtcagtgtggatttaaggggctggagacttaggctccgcctcttgctgagaagagtggcaatgtcacattgcaaaggggcatgggcatgggcatagggatgtatgattcactgagaaccattactataacactttatgcattgtaacagattatctatcacaaaggtcatccttcggcggtaggaactatggcaccctcagagtttatcacctatgtaaccatagctttaagcttgggcagcaatatgagaagccacccttagtgccaaggcaggggaggagaaaatggcagtgcaaaccaagaagtctaaataacagttcagaaatagcaccagaatcacctgggatggggagctttaaaaatacacttactcctagagcccacagaggattctgatttcaatgggataggcctggggttggactaataactcttttggtaaatccctcccaggtaatccagatgcttaacctggttttgaaatctttgcactaaacacaggatatcctgagggctcagactcattttgaggaatactggagagaggctccttttttcctagcagccaaattgttttgagactattgctgtgacctggagacatgagatatatttactgactcatcttgcacaagtactacaacaatgtgggttaaatacaattctctagattctagccaccatttacatcacttttcacccggaagaatgtattgtgtctttcaaatatctgacttataagatgacttttgcaatatcatcttttgtaaattgagggtggcctgtaacttggttgccttagcaacaaattggactgaatgttaacagttgagtccagatgttcattccaggcagacaagaaaacacagcctggtccactttgaaatgcactcatcagtactgcccacatcagtgtttgacatggttctcagatgcctcatgttgtctttaacccaactcggagccatgggcattacccgtgccagattacattttttctttttactaaagagacagcaatgtggagtaaaactgatcattgatttttaaggcaaaactattccagtgtctaattcagggacatcatttaaaaaatcatatgggacttccatatgacttttttttcatagcaagcatgaccctagacaagcacagttgattggttgattcaactattttgataatttttattaagaagccatattttgctaggtcctatgctatgtcctagggagatgagtctgttataatttcttcccttgaggagttcaagcctagagaggagatggtatttaaatgacttctacatttgtgagcaaggacaaacaaagatatatgcgaaactggggagtccaggggacaacagaactatctgtctctgagtaggtcaggaaagacaccaccaagaagccacatcttgctggataaggtggactgtgcagggcagagagagtatgaaggaacatccctgcaagaggaattgtctttgcaaaggtgagaactggaagctcatggtgtattgagggaataccaagcacgcttgcatgttcaggaaaaagaagagaaaggaaaggtcttgttggtcacactaagtcctcaggctttagagaatggagttatggagggaattagagcaggtagtgtgacatgatcaaatgcacatcttggaaagttggtagcaaccttgaggacgagttaaagaaagacagtgaaacagtgtgggagtaattctacagtagggataagggatcgggtttttaacagatgaagctatactgggaaggaaggaaggaaggaggatttagtggccagatgtgggtttcgggaggagggtggagccgaggaccccctaggtttctggcttgggggtgttgggtctactttttaaccaggacaggaacacaggagcagggacagttttgataagcagataggttgacgcagatttcaatttggagtaactaaaaaatgtcaaaacagtaataaataaataaataaataaataaataaataaacaaacctttatttaaaaaagtctctatcgggatggacatcttaacgcattacaggtttaatgtctccgaagcttactgatttatcccccttttccctcactctccaccatctcttctgaatattccctgacaagataatatgcaaggaaagttctgccaactcaagacaatgtttaacgtaaaccttggcaggggttacggagttaggtagtggaaaaagtgttaataatgataataataatatttatatcatattccatagccttcaaactgcttctacctaattattttacagtaataatgtctgtaaggaaaatacaagcattattttttaatcagcactttgcagaacaggaaacacacacatacacacacacgaaaggcagccatagagcactgaagaacaagtgaacagagagccggaggtggattcaaacaccttctctgcagctgatgaacccaatgtgaacttagacattgttctctccgagccccaatcccctcctttaggaaatggggttagcagagaggatggcatgttgcaatggatgtgcccagtacaggcttaaccaaaggatgttaaatccccaggcatcatctctgtcactgccagcccgatcaccagccaagtggagaagacagatcactggaacaagcctaagccgttgaaactgattgccacagtgttacattgtaagatgttatcttaaatattttgtaactgctgctttgctggggaagcagggtgtcttggttttccagagctttctctctaccctactggtcacagctggtggacatctgtcctgtcctgggacaatcagacccttagtggtgggaatttgaaattggttcgctctgattctaatcaggctaagaactgttaggtggtctacaatggcacattctgccaggtgaaggaggggagcagagaatagagaaaagtgaatgaagcaagtttgcagagagagcacagaggtgtgggagatggggagagaaggacagagactcagagccagccactgcctcagtttctgttgtgggttttggttccccaaaacatccctgacttgagatttgtgttagccttatatctttccagcaaattgtcctcttgattaagccaggtggagtgggtttctgttatttgtaaccaaccaagcctgtgctaaaacagatgagggcctattttcagataattgggcccaagaggctggaggcgagcatgcaaccaacacatttgtgaaaaatgcaaagaaatttatatgatcattctcagaaagatgccctgtttgctcagggaggatagtgcagttaaaaaaaaaaaaaaaaaaaaaaaaaggaaaagtcagcgacagctaaagacttcagtattgagccagttctgaaaggcattgagactgacccaatgacccacatccaataatatgcggcatttacaagacagagagggaggcggtggtgtgggcacacaagaggaaaggggactcaacagtctggcttccaacaaagaaaaagcgataataatgcttggtgtggattgtaaggcatttaatctggaggaacttgcaggatttgtgaaaacatctgctgctactcatgccgctttgtgttttgctctctcagggggactgtggtttgggggtgtgtgtgtgtgcatgtgtatgtgcatgtgtgtgtgtgtgtatacacatgcgtgtgcttgtatatgttcatgcatgagcatgtgggtattacaaggaccactataacatctgattctgtgaattgttaaaatatacagctgacatatataaaaatggcacagttttaagaaggcaatcattatttaattattctcaatgcaatacttacggtagagaatgtagataatacataaaagaaaacaaaaagtcttagtctgattacccaagaaatcttaatactttcatgtgttacctccccccttttctttttcctactcatttttacatagtttcagtcattctaggtatacgatttttgcattttgcatatattgcttatattatttcgtaaacttgcatccttgattattgaacatccttatcaacatttttaatgactctaatattccatggtatgcaaataccatcatttacctaaacatttctctatttgttcatattccaatagatttttcttcacaattataaatgataccacaatgactagctttgtgagcacaagtgtttttttaaccctatgttggacttgtactgttaagcatatcacagataaacagataccttcctcaagtgcatcaaatagttactactactacctacatatgaagacaaggtgacaggttgtgtggatgagctttttaaagtatgtgggatttaaaatctgacctcatggttacatttcaatattggataaatgaatccctttctgctttgaagactttcagtcttcaattgctccctttaaaatgcaagcatcataataccttgggcaacagggaccaaaaccctcttcaatgaccagatctgtagacaaagtcctgtagaaaagtgcagggacttggacctgtgggtctctgctttctcacctccactcttcttctccaccacattcgctcacagtagtgatggttctgactttctaatctggccctatccaaacctgcctggttggtacaggtgacctattctcactactcgatggcttatcctgctgccttttgtacttagaaaaatactgggctcttttctcctcattctatgggagtctacctcctcacccctctaggccctctgggattttgaccccatttccaacaaaagctccagttcttcaaactcagaacttcattctgatctccagatcaacagaagccctggactcagctgagcttcttccacattcaaattcagacccgttcacccaagaacaagatatggttgagactggctagatattcaccaaagctaattcttctcctgggcacacagttggacaaagctttgcatgtagctgtggtcatatgtttgagttctcaccaatgaaaaagaggtggaagttactataccacttctaggcttgattcatgagatcctgtgtggaatccatcactctcctttccctggtcagccatccagaccctgcaggggacttgaatgccttaggggatgatgaagacaccaaataaaaagagcctgggtgcttgaatgactgagtaaagatctcacctccacacaccctccaacattcattcaaccatcattcttaaacaaaaattatggttttctggtcattatttccattttttgcctgtgccagatcatctattcttacagcatcaaatagaaaaatttgactacagggcacttagagaatgtgatgtggtggaaagaggccagattcatcaaattcaagctgtatgactttagacaaggccattctgctctcttggcctcagcttccccattagtaaaatcaagaggctagtctacattgcacataagaattctcctaaccctaacattgtatggatttgacaaattacaagaaaatttcaaatgtaaggaactaaatatgactgctatgtcttataattttcaaaatgtcaattgaaattcccaatatcaattgaaaatcccaattgaatagacatcttgaaaaacgtaacagtcataaacaacacaaaagccaaagatataaaacaaaattggataaaaacaactgaagtatgagattttattttttccagtagtgagattaattttttgtcatgacagataaatgagacaaaagtaagcatgtgaatagagggccaattaattatatatatatatatacacacacacacaaatatataacatatcatatagcaccattatgcactaaaagaacttgaagtcctatgaatgtacagtctttatgtccttagatataaatataaatatatgtaaatttatatatacaaattgttcatttggctaaaaagaaatcatcatacattctgttatacaagtgatttcgcaggccacatttcttttttttttctttttttttattatactttaagttctagggtacatgtgcataacgtgcaggtttgttacatatgtatacatgtgccatgttggtgtgctgcacccattaactggtcatttacattatgtatatctcctaatgctttccctccccaatttccccaccccacaacaggccccggtgtgtgatgttccccttcctgggtccacctgttctcattgttcaattcccacctatgagtgagaacatgcagtgtttggttttttgtccttgcgacagtttgctgagaatgatggtttccagcttcatccatgtccctacaaaggacaggaactcatcattttttatggctacataatatttcatggtgtatatgtgccacattttcttaatccagtctatcattgatggacatctgggttggttccaagtctttgccattgtgaatagtgccgcaataaacatatgtgtgcatgtgtttttatagcagcatgatttataatcctttgggtatatacccagtaatgggatggctgggtcaaatggtatttctagttctagatccttgaggaatcaccacactgtcttccacaatggttgaactagtttacagtcccaccaacagtgtaaaagtgttcctatttctccacatcctctccagcgcctgttgtttcctgactttttaatgatcaccattctaacttgcaggccacatttctaatcataatataattcaattaaaaagaaagccttaacttcttggaaactgaaaaactttatcttaaatacacagaccctagatcaaacaggagatccaaatgtaaattataaactattttaaaaataatcaagaaaaagagacaatttcatgccaaaacacgtggaggcagctagggatatatccagagtaatgtgatccaagcatttcaacattacaaattagaaaaaaaggaacaaaataacaaaataaaattagaagaatataagagctaaaaataatgacattattttctttttagcgaagtaaacaataataatgacataaagaaaaaacatgtatctaaataaaatcaaaggtcgtcctttgaaaaaacatggtacatttggtgaagcaaatgaaaataagagagtataacatattaaaaaagagaaaggtggtataaccataaatagacaagatattaaattttaaaatattatgtataactctgtaataagaaatttgagaatttcgagagtgataatttttctagtaaataaaatgaaattcaaccgaggagaagaaaatcacgtaacagtttaagaaagttatttaaatacctttataaaaaccacctcaggtctagatccttttttttccaaatgattttaaaaatatatcctttaaggaaagataactctgataatatttaaattatctcagtccatataaaaataaagcttttccattcattttatatatccaacataattttcatgccaaaacaggatacaaataatgcaaaaataaaactagagataaattttacctataaatacagatggaaaatgttaaacaaatggaatcaatcagtgcatccaaagtacaaaccatgactaagcaaggattattctaagcatggctcatcatcaacaaatatattaagacaatgtattacaaacagaaattaatgggaaaagccatctggttgaatcaatagacagtgaagtgacatctgttattgtgccacccagtagctattttcccttcttctggtgactgataccaaagctttcctctgggaatccacctgctcatctcctttaagcagatgtagaggggatgagatcctacccagctcaggggtgaagcttgtgatctacatttgagccaatcagcacatcacatttccctggtcttaatgattgtgatttagaggtaagactatgggcgtaccaatcagagagatgcaataaaatattttctgggagccctaggaatccctatctcttcctctaccactagatttgaagctaaatgcttacgagttttacagttgttgcagctgattgaggggccacgggggaagagtctgtaagagttacctgatcctgataacacagtttgaacccttgtatcaagctggtctcaagccagcctcattctgagcattttcagttataaaagccaatgcattcacttttcactggagtcaatttgggttaagatttcctggaatttgtcacagaggaagttttcattgatgtatatgccaggatacatttgataaaatccagtagacattcctaatgaaaactttaaccaaaacagaaattgatgggcagtacttaaatataataaagacttttgaaaaaaacttcagtgaaccccttattaaggggcaaaattctgaaaccatttcctttaatatcatgagcaagacaggtatgcttaccatctccatttctatttaacattgttttggtggttaagccaatgcacttagtaaagaaatgagatactcaggaaaaatattttaaaaagaagagacaaaatagaatttatctacaaatgatgtgactctaaacttaaaaaacttgagtgactacttaaaaaatgtctagaatttatccaggagctgataatttggctagaatctatctaagtacataaaaaatcaagagcaataataaaaaaatcagaagaaactcccaatcataatgtgacttaaataatatgagacaaggaaaaaatacatttgatgggaatggttctaaacttaaaaagatattaaaatgcaaacaactaataaattttattgaaacatataaaaacatgtcctgaacaaattttttaaaataccacatgtatgaatgagcaaactcaatattataaatgtcagtcttcccaaaaccaatacgttgatgaaatacaatttcactcagaatcttcataattttaattcataaaattaactaccaaactattttaaagtgtatatggaagagtatatgtctaagaaaaccaagaaaactgtaaaagtaggaggaaccacgatgtttctttattaagcttacaataaagtaaataaaattgtatattattggtccagaaataataatttagtagaataaaacagaaataccagaagagattcaattttatatgagtatatagtaagtgacaaatatggaattttaattcagtaaaacccgtgcgtgtgtgtgtatgtgtgtctgtgtctatcttatttaaagaaattagattaatatgtaaggtgatgttttcttgataaaattaagaaaaagtaagtattctgctggcaacaaaattagggcatgcagtcagggaatctacaaggcatatgaagaatgatcacttcaaaacaactaacctttagataggaaactggaccttttgtgtgaaatctatcctgtgtttttttttttcctattaggataaaattatatattggctatacatgggtgaacagagaattaaacctgataacagaccaatccatcttgcaatacaaaaatgaaattataaggaaaaagattatctaactatctcggtctgccttctgctgctataaaaaaatacttgagagtgggtaatttataaacaacagaaatttattttctcacagttctggcatctgataagtcctagataaacagtggcagattggtgtctgataagggttgctctgcgcttgcaagatgtgcctcttattgggtaatcacatgggtgaaggggaagatagctccccagtatctctctcataagaacgctaaccccacatgggagggctctgccctcatgacttaatcacctcctaggggtctcacctcctaatactatcacactgatgatgaaatttcaacatatgaaacttgaaggaacacattcagaccttaccactgatagatctattaaacgtgggcttgttatcctgaaatagttataccattgcaatcaaaaaaagttagaacaaaatccaaaataatgtcaaattgaaggtattatttgtagccaggcacagtggctcatgcctgtaatcccagaactttgggaggctgaggcgggtggatcatgaggtcaggagttcgagaccagcctggccaatacagtgaaaccctgtctctactaaaaatacaaaaaattagccgggcatggtgtctcgcgcctgtagtcccagctactcaggaggctgaggcagaataattgcttgaacccgggaggtggaagttgcagtgagccgagatcgtgccactgtactccagcctgggcaacagaacgagactctgtcgcaaaaaaaaaaaaaaaaaaaaaaaaaaaaaaaaaaaaagtattatttatacaaactgatatatcaacaatgtcttgcattataaaagtgccaataggttgctggaaggcaaaatatttgaaaggtggagcagtctgaaataaattgtgtctctattttgtttctgatgtagttttagaagaatgttaaaggaaatataacggaactaagatgatgcaaattagagtttggttggtcccttcaggaaagagtttggcatggccatgggccaaattcaacctttgctctatctttgtaaagttttgttagaatatagcaacacatttttgttacttaatgtctatagctgctgtcatactatctacttggcttaaaagaaaacttgtttaattctagaaatggagcagactgcagtctctgagtacaactcagtaaatttaaaaagaaatcatgaaagtaagaacaaacaaacaacccaaaccacttggaaaaaaaggaaaattttaaatatataataaaaatttgattcaaagaagtcaaaatctcggtttgttccagaaattttgaaaaacaacggtaactatgatgtttcatgcaaaaacttagggaatactgccaaaactgcatatttcattgtttcattacatataggaagggtgaaaataaattattgaaagcatttaattcaaaaatattggtgaaaaaagcataccatgaaattctgaggtactcagaaggaggaattaataaaagaaaagtaacaaaggagtaggtttaaaagacatattcagattgaatttgttggaaatcaaacatatttccatctagataataatgtagatgagccaacagctaataaaatcaataaaaatagaaatataaaaatatgtacaaatgcacctaacagcagttacataaaacgaaacaaaaatacaccaccaacaaaaatacataaaacaaaactgagaactggaaagagaaatatgaaaatccacaactatatttgaaaactttcctctcccagtaattgatagaacaagtagagggaaaattattaaaattagagaaaatctgagcaaaacttcaaccacttgacctaagtgatgttatttcagactccattcaacaacagcaagatatacattcttttcatgtgcccctggcaaattcaccgagatagaccatataccatactatgaaacaaatcctaacaaatttaaaagaacttcaataacaggaaatgtgttttctgactatagtagatttaaactaaaaattaataacagaaagatatctgaaaaattccccaatatttgtaaattatacaaaacacttcttaatccatggatcaaagagtaaatcactagaaaagctaatgcacattgaattgattgaaaactaaaacgcatcatgtcaaactatgtgtggcagtgggatacagctaaagtagtacttagaggtaaatttatggcagtaaaatacttatattagaaaacagaaaagttctcatatccataatttaagcttctaaattaagaaactagaaaaagaagtacataataaatgtaaaggaagcagaaagaaggaaatactaaaggtaagaacagaaatgagtgaacttgaatatagaaaactaatgaaaacaaatggtaaaatcaaaagctgattctctgaaaagatgaacgccaggcatggaggctcatgcttgtaatcccagcactttgggaggccgaggcgggcagatcacttgaggccaagagtttaagaccagcctggccaacacggtgaaaccccatctctactgaaaatatgaaaattagccaggccaagagtttgagaccagcctggccaacttggtgaaaccctgtctctactgaaaatacaaaaattagccaggcatggtggtgtgcgcctgtaatcccagctactcaggaggctgaggcaggagaatcacttgaaccagggaggcagaggttgtagtgagccgagatcgcaccattgcactacagcctagccaacaagagctaaaccctgtctcaaaaaaaaaaaaaaaaaaaaaaagaaaaaagaaaagatcaataaaactgacaagtctctagccagactgatcgagaaagaaaagaaagaagacacaaatcgttagcatcgagaatacaaggacgaacattactacagatctttgagatattaaaaggaaaaataaatattagaagcacttaatgccaataaatttgatagcacagatgaaataaacaaattatttgaaagacacaaactaccaaatctcactcaagaattaggtaacgcatttcaccaagaaaaatccatatgaaaacagtttcactggggaattctaccaaatatctacaaaaaaaaaaatagtatcagagaaagaatagtacttttaggaagcagtgcttaaacagatatccatatgtaagaaatcaacctagacccataccttgcactatatataataatcaactcagaacataacataggggaaacattttgtgacctttgttaggccaagaactttgagatatgacataaagtacaaaacaaagaaaggttgattagttgaaattcattgaaattaaaaactcctgctcttcaaagggcactgtcaaaaagataaaaagagatgtcacagacagggaggaaatatatacaaaacacacaaatgtgataaatgattgtatccagaatacacaaagaactttgaagttcagtggtacaaagacagttcaacttaaaatataggcaagcagtttgaacaaagatgtcatcaaagaagatatgtgaaggacaaaaagcacatgaaaaattcccaacagcatcagtcattatggaaatccaaattaaaaccactatgagctctaatcacttacacactcacctactcatgtggccaaagcaggggaaagggagacaatgagaagtcctcacaaggctatgaaatgactgggactcttcgatacagtgcaaaatggtacaaccactttggaaaacagttaggcagcttcttataaacttatactttacatataacccagaaaatcaaatcctggatatttatccaagagaaataaaaatgtatgtctattcaaagacttgtacacaaatattcataacagttttacctatagtagacaaaactgggaacaacacagatttctatccatgaatggatgaactgtgatatattcatacaatcaaatactactcagcaaataagaagtaaagtactaatacatgcagtagcgtggctaaaccttgacagcaagatgcctcatgaaggaaatcagactcaaaaagctgcatcctgtgggatatcatttacatcacattctagaaacagaaaaactatagggacagaaagcagatcactggttttcagggccgagcacagggaagaattaattttaaaggggcatggggaaactttttgggattatgaaaatattttttatttcaatagtggtagtggttatacaactatacatttatcaaaattcatttaattttcctcctagaaatggtacattttattatagataatattttttgaaacttaaacacatacaaaattatttatttgggcaaacaagcagaaacaaagatgacattagagtgatacggcacgatatttttgcccaaccctaccaccattttatttgaaaacctggatggatttccaagaaaccacaaatgaacaaatttgactgaaaacacatggaaaagctaaataaatcaataatcataaaatgaactaaaacacataagaatatcaagaatatcccagtggtttgagtgcttctcctatactctccccaaagcaccaggacattcagttttaggaaagagtattttcattcctttaagaaaaaagtaattcctatatccatgaaatggtactaggacataaaaagtgaaagacaatttaggaattcctttttaaagctactctcacccccatagcaaaacttaacaaaaggtaggcttaaaaacccccaggccaatcttacttatgaatatggacgcaaaaattttaaattaaatattgttacttgagcagctcaataaaataccatatcttatgataaaatgagatttatttcagctgtgcaagatggttcaatattagaaaatgtgcattcatgcattaccacattaagagatccaacagaaaatcacctgatcatttctgatcctactggtttatacctttcccaagatctcacatggctcaccctacaaggcattcaaacctcactcaaagaacacctccacagagaactagccttcttgaactatctttgatatgtcaccttcctaccagcccagaaccatcactctccacgagagtagagactttattttttgtttgagacagagtcttgctctgtcacccaggttggagtgcagtggcgcaatcttggctcaccgcaacctccgcctcccaggttcaagcggttctcttgcctcatcctcccgaggagccaccatgcccggctaatttttgtatttttagtatagacggagttttgccttgttggccaggctggtcttaaactcctaacctcaggtgatcagcccgcctccgcttcccaaagtgctaggattacaggtatgagccactgtgcccggccaagactttgtttactgtctacagaatgcctagcactactcaaccaatacttgatggatgaatatcagtagatattgacaagggttttaagaaattcaatctctatctatgataaaaggcttggtaaaatggaaacaaacagctactttttaaaatgacaaaagagaaaagtatctcatatccaaattttgctttctgtttaatgttgaaataatccaagcatttctattagattcagaacaaaacaaggatgtcctctattccagatataagtgccaaagcaattaaacaagagactgaaataaaaggtatgcctgtttttaaaaaggaggtaaaaacagttattatttgcaggtcagccttggtgaatcagctgaaaaactattagaaaataaatagaagatcttactaagggagctggttataaaattaacatgaaaagccagtagcttcacaatgtacaataaacagaaaatgcaaaggaagtaatgatcagttcaaaaatgtaatgcaagaagaatcctatacataaaagtcatcagaaaaaataatctaggagcaagtgaaactagaaatctgaagtacctatgtgaataaagctatgaaattctactcagaaatatgaaagattttatgaagtcagaataaattcaatattgtaaaggtatcaattcttcctaaattaatctataaattcaatgcagatagaatataaatccagtaggatttctattgcaacttacagttctctcccacttatctggaaaaataagtgtgtgagaatatccagaaagtgtttgaaaaagatagcgggagatagatctatcaaatattggtaatgtattggaaaagtacagaaggtgaaactgtatggtaatcgtgcagaacagcccaacggaaaatactacagaatagagtccagaaatagaactgaaggaacatgtaagtaaaaggcagcagtagagcctagggcaatggttgggcattaggttcaaatcccagttttgcctcttcttgctatgggaccataggcaagttgcttacttttattcatttagtcactgattttagagaagggtcttgctctgttgctcagggtggagtgcagtggtgtaattatggctcactgtaaccttgagctcctgggctcaagtgatcctcttgcctcagccttccaaatcagctaagactacaggcatgtgccaccaagctcagctgggctttttgtcttttttgtttgtttgtttgtttgtttgttttttgtagatacggggtttcactacactgcccaggctgcttttgaacttccagcctcaagcgacagtcctgccttgacctcccaaagtgctgggattataggtgtgagccaccatgtctagcccagttgctctgcctttctggaaaacattgttctcctgcatggtagtggggaagaatagtattataataatagtaatgacctcagatggttttgatataattacatgaaataatctataaaaatgctagcataggacttggcatttaggaaatagtcaatacatgctagcatacatacctgcatacatatatgaaattcttattttaagtttgtagaggaaagaagttgttagcacaactagttagctatcttggacaaagtgtgtacatgggagtgatgctgtatgaggatggtcatctccatcattatttataggggtgaaacattattgatccacatgactaagaaaaatgaacataagagacctctatatattgatacaaaaagacaatgttatcttgttgagtaaagaggttagaatgcaacatgtatatagcacaaacttgcaatgtagaactgtgttcataaatctaaatgctttctcttcctgtagtgggttgaatggtgactcctaaaagatacatctgctcagaacctggaattgtgatcttatttggaaataggctctttgctgatgtaattaagttaaggatttcaagatgagatcatcctggagtagggtgggccttaaatccaatgacaagtgtccttataaatggagaagaggaaagacacacagaggagaaggccatgtgaagactgaggcagagactggggtgatgtgtcaatgacacaagggaagccaagggtcactgcagttaccagaagctagaagaaaggcatggaacaaattatccttctgagcctgcagaagaaatcaagcccgcaaacaccttggttttagacctctgacctccagaattgtaagagaataaatctctgctgtttgaagccatagggtttgtgataatgtgttacagccgccacaggaaaaaactgtacttcccaacatcatcaaaccccagtatttatctttgaaaatccactcgttcacctcacagttcagtttctccctacctccaaggaccgactggccttctatttgctgcccctaagttaaatagaagaaattgtttgcaacctggccctatgcataattcatggctgactctggctgtatctgctttgtcagcttttgatctcctggttaaagagataaaggtgttatctgtattagagtaacagtgtccaataataggggattgggtaagtaaattagggtccatcaacttgataaaatattacatagtgactgaataagataatgattaagacaagcaatgtggaaaaaataaggtctttgacataacgctaagtggaagaaagtatgttatcagattgtatctacaatataataacaaccaggacaaaattcttcctagatgtggacaaggacttaaaacaggtggatatgttgggctgtgggactgtgggtgtttcttcttccatttagagtcttagaaatgctattataatggtgtttgtgctatagtaaaaatggaaacaaaaaaggcaccaaagcctacagtttctcacagggtgcatagaagctggagagggagaaaggatgccctatcatctccaagtaaagggccctgtacagaagctctatcaaactttgtcctaatagagaactgggcacctccatttacagtatgaagtcttggatttttgagtaatgattcaaattcatttttgaatgaagctgaaattcctcttggcagattccaggtaaatgcaaacactggataagatacaatggcagacaaaataaccccgcacctcagcccttcctatgacctggctttcttggattttacccaagcagcctcctgccattctcttcccccaaccctatatatatgttgttcttcatggagattcctccctatttcctgaacatgccttgtttcgttgtttccctgcaaacacaaaaagaggctacccctatattccttctcctcttttaagttagaacttaaatatatattttgctgggggagacaaaattcaatcctccaggagagtaatctccctggaatttttagggagaaaataaaaggaaaataacagttagagaaaaataatgaaataaaaaaaaatggacaagctaatatctgttttaaaacttcattcatactttgaagcaaacatttactgtatctagcatgcccaagatgaatgaataatatgaagatgaggaaggcttgacatttatttgtctatttatttattcattttttagagtcaaagtctcactctctcacccaggctggagtacagtgtcatgatcatagctcattgtaacctcaaactcctgggctcaagtgatcttcccacctcagcctcctgaggagttgagatgacaggcatgagccactgcacccagctaatgttttaaaagtttttgtagagaaagggtctctatatgtttcccaggctgctcgacattttttgatcccctacaatgttccagaagttctcacacataagctcattttatcctcagagtgacattcaacaggtatttgtatcccctcattacgcaaataaggaaactgaaatttgtcaagtgagcaattgaagtatgatttgtctggactgaaacatgctgtaagtggaaaatgcacgctgtatttcaaatcttagtataaaaagtataaaatatcttgttcatatttttatattaaattacatggtcaaatgatacaattttggattacatattactaaaactatacattattaaaataattttacctgttttttaattaaatgcagctaatagaaaattttaaattacatatgtgactcacataatgtttctactaaaaggtgccagtctaaaatgacagaactgagaatgatgagtctagcttagactctggctcagggctccaaaactgaccacattatcagccttacttaggtctctgcctccacagcaaggaccatgagttagaaaacaatgtttcagaaataacacataaatagttaacaactacatggaaaaaaatttaatctagccaataatcattaaatgtgtggtttatggctgatatgtgaaagacaataggaagatgaccaatagcttgcactcaaaatcaatgtccaaatcagagcagaacagagagacgcaaattacctggacacaaagatgggttcccaggctctcaggtatgtactgccgctcagatctggagaggggtagggtattcagccaggaccataggggccgggtcatgttatgggaaatccctgctgcagcacataccccagtcttgaccacaggagaggctgtcctggctgtaggacaccctcccccggcggaggaggaagctattaaagatgaatctcctatctcctcttgcctttgagaaagacttcccaaatttcatacaagctgcctcccactataagtaaaacatcagctcccagaggagagagatttgtctgtttggtccatcagcgtatcccaactgcatagaacagttcccagcatataatgagtgttgaagaaacactgaacaaatgaactagcaaatgaatgaatgggttgatttccccccacagggtgctgccaatagtgagacactgtaacagctacaatgagcctggttttctctgtgacgacttttgtgtgtccctctgatgcatgaggcccctgactttcagtgtcagtgttccaactgtacacataggtccatcccacccaatatgtggccaagacagaggttgagcctggctcaccagggctggaataaagttcaagctcagttgcacatgcacacaatttgcacgagcatgagggaaagaggggttcattgctttagcaaagagtgaagagggaggagcttcaaggtgcctacagtaccagggcagcaggggaaggttagattttgggggaaacatgaacagatggcttcctctattttagcatgtctctgctttgaaccacctccttttcttagaactttgcctcacaactctaagactcccctccaggcaatagtactttctggcatgtggtttagatgttaagcactgtggatgctggaacttgaggctggggtaaggcagctttgagtactccttttatccccctcatgccctcttttcttctccctctcctaggatttcctctcctccagccccttccctacctccctggttctggttacttcctcctataatttctgtcctgacagtagaggatcacctgaagaccttctgtacctgtgaagtgaccttatttgaaaataaggtttttgcatctataatcaagttaagatgaggtcattagggtgggccctagaccaatatgactggtgtccttataaagagcagaggagagacactgaagagacgcacacctagcgagaacgccacgtggagacagaagcgagactggagcaatgcagccacaagcccaggatgccaaggattgctcataacagcagaagctgtgaaaaagccacggcacaggttttccccaacagccttcggagggggtggggacctgctgacacctcgattttgatttctgaattccagcctctgagactgtgagagaatgaatgtctgctgtctaaagccacctggtttgtgatgctttcctatggcagccctgggaaaatcatatcgggttgctatgtctgtctgtcatcagttatgacaggtgacttggttaccaacaggcacaatttcaatgagaaaaagtgaaccattatgtaaacacatttatctgagggcctgaatacgactgtccaatgcctataatctctgagtttggggttatcatgaaaaaggaatgctgaactcgttttgactcagataaatgtctgagctccggtgcttattctggccgtgcaccacttcctcaaccccacacaaatgcttctttgctctgattgcaaacaaaatgcatgcttgttagaaaacccggagagagagagagaaaaaacaaacaaatcataaagggaaaataatttgcctcccttctccttacgccaggctaatcactgttgatgttgtgttatgttctcttcctctttcctcattacgctggtctcacaagggattcaactcaccttgctgtccagcacatactcacttggttactgatgtctgagccactgatgtagtcctcacagcccccaccttttgagggggattctggtctgtcttcgtctgtccccagagtgtgaagagcccaataaattgttagtagttaagcaattctgaaaccaacccctaccaacatgggtctaggaccaacccccgccaagacctcacaacatttgggggtgttgcagagaacactgtagtggggtttgggaattgctgcggataagtgaggcagctatggaagaagcccctgtcagtagttgaagcaacccagagtgcacttctgaaccttaggaaaggattaggattggtgacaggggatttcaccactgcctcttttgagtttaaaagctccaaccttgccctaagtcatgcatagctcacccagaggtgaatcatattagcccaggtgtctgttcttggttgatccagaactgcttcttctttatcttttaattctccttggaatcaggtagatcccatataaaccctcaaaaagtaaagtctgattacctcccatctttctgaaaaattagatgcagtctgcacttctcttctcaacgtaatgacatgtggtgtttccagcaagttcctgaccccctaacatacacacacacgcacgcacgcacacacacacacgcatgcacacacacacacacttttttaaaggagttgccaagtgcagcaggttgggtggcggtctccaaaagatacatctatctggaatctgtgaatgtgaccttatttgggaaaagtgtggagaaagggacaacaggcaggagattatcacagtcaggacaagaaaccaggagacgttgacagtcacgactaaggtggtaggagtgaagacagagttgtgggatttcagggacatgtggaggtagcacatgagggtgatgggctgacagggtgtgtgtgtgtgtttgggggaggagagcagacagtgctcatggataagacgagtcaatatcattaaaattgccatactacccaaagcaatttataggttcaatgctatccctattaaaaggccattgacattcctcaagaaactagagaagaatattttaaaatttatatggaaccactaaaaaccctgaatagccaacacaatccagcaaaaagaacaaagctggaggcattgcactatccaacttcaaactataccacagggctatagtaaccaaaacagcatggtactggtacaaaaacagacacagagaccaatggaacagaatagagaacccagatataagaccacacacctacaactacatgatcttcaacaaacctgacaaaaaccaagcaatgtgaaaaggattccctattcaataaatggtgctgggataactgactagccatatgcagaagactgaaactaaaccttttccttacaccatatacaaaaatcaactcaagatggattacagacttaaatgtaaaatccaaaactataaaaaatctggatgacgacctaaccaataccattcaggacataggcatgggccaaaatttcattatgaagatgccaaaagcaattgcaacaaaagcaaaacttgacaaatggaatttaattaaactaaagagcttctacactgcaaaataaactatcaacagactaaaaagacaacctacagaatgggagaaaactttttcaaactatgcatctgacaaaggtctaatatccagcatctataagaaactgaagcaaatttacaagagaaaaaaaacccatacaaaagtgggcaaaaaatatgagcagacacttttcaaaagaagacaacaggcggcaaacaaacatgaaaacatgctcaacatcactgatcgttagagaaatgcaaatcaaaaccaccatgagataccatctgacaccagtcagaatggttactactaaaaagtcaaaaaataaacagatgctagcgaggatgtggagaaaaaggaacacttatatactgctggtggcagtgtaagttaattcagccattgtggaaggcagtgtggtgattcttcaaagacctaaagacagaaataccattcgacccagcaatcccattactgggtatatacccaaagcaatataaaacattctattataaagacacacgcatgtagatgttcattgtagcactattcacaatagccaacagaatcaacctaaatgcccatcaatgataggctggataaagaaaatgtgatacatatacaccatggaatacaatgcagccataaaaaggaatgagatcatgttctttgtaggaacacagatggcggtggaggccattatccttagcaagctaacacagaaacagaaaaccaaataccacatgttctcacttataagtgggagctaaacgatgaaaacacagggacacatagagggacacaacacacactggggcctttcagagggtggaaggtgggaggagggagaggatcaggaaaaataattaatgggtactaggctgaatacctgggggatgaaataatctacacaattagctcccatgaaaaccttcacttgtacccctgaccttaaaagtaaaaaaaaaaaaaaaaaaaaaaaggaagagaaagactaataaaagaatcagaaatgagtcaatttctctgccagggacttttgcatagtatccctttccaccatgtggcaaacttcacagagtccttgttagtctccctgcttataggctaggtatcaggccccagggaatgacacgtcacccagggttagtggcacagttagactgcatttcccttttttatgtgattctttgcccacaacccttctaatacaccctcagtctggccccaactctctcagcctgtggcctcatcctgtgcccaggcccctcactggtctcagccttcttccagctgaagcctctttatttccagcccctttgatcagagcttgggttgatgcaatgcaccactctaggggaagcataaacccagaaaaacatcagggggttgtgctgttgacatcacaatcataattctggaaacttatttgaaggaaataatttaacaagacaggaaaaagcaagttcataaaaatgttcatggaaacctctatgattttccataatggataaatgttagaggctatgtgaatgtcacataaggtagttaaataaatcatgatagtgtcacttgatgggacagaatgtggccattaaaatgctaacaatgtaactatgtatcattttacatgaggaaaaagcatttaaaataataaagatgcaataattacagaaaaatttcatatgtatatagacaggtactaggagaaaaaaatgaaacaaaagtaagattctgagtaactgataatttgttttctgttactacattttataaatataaacaactaactttttaaaacaaatttaaagcttgtgctaaactgtgacttagcccccagtaaatctctatttatttggcatctgctaaaagaaccaaatgctcttgagatgctgatgggaccaaccttaaagcatttaggttttttattttttattttttggcccttaaaacatttttgttcttgtcatgactttggacactcaagttttccaaacctcaaaaaacaaaacctttttgtccccagctgaaatccaatgtcacaggtgcactttctctgtgcaaaaaatactcccaatttactgacagaaacttaaagcccagattgcagctttcaaggttactccaagggcattgttatcctaggacccatatgggtcaggctgtaagtttcctaccagtggattccagagccttgggcagagaacaccagagctggtagtaaacaccttccacctgcctcccactctcaaactgagggatacttgtctgagggggctcgctgtgcctcaaaagccttaaacagcaagcaaaatgagcttccctgtgcctaatttgggaatgatttactcatttacacaagcagctcaagtttggtacaattagctggtgtaattggaagtcactgtctatgaggatggatgcagcagcccccagaccacaccaagtgcagtgaaattacagcaaattgcagtgctcctgggcactgtgaaacagactttgccatagcagccatggcacatctttttgtcagatgagaacacaaatataaaacagtccttagcaacatctttcttcccaagacaagaacgcaagagggaatctaggatgcctttaaggtattatgtagggagatggttccagtaagaatcctgttaaagagagttgcctctctctgacgtatgcgtggaaaaagatggatttaagcaaatagacacggctgacaaaagtgtatggaaaaagaaaacaagaaatgctttttgttttctatatttctttgacattacggaatttactgctcagctaaaataggacaggttgagggggaagaaaggccaattctttctttgtgagttacgtattatgagtaatatgggttctgtattactcaaacatccagtatgcatccactctctgctaggtactcttctagatgtctgggaaacattgatgaacaagacaaaatccttgcctggagcgtgagatgcacacaagcaaacccacacaaagattactataacgcaatgcagtcattgcaatgacaaaaatactccagaatgttacatgaggggggtgcataaaccagttagaggaggtgagatgaagtctctttgaaaagaggtaatgcccattctactcggtgacttataagtttgaatttttaagttccaaatgtaagtgaaatcatgcaatatttgtctttccatacctggcttatttcactcatcataatgtcctccaaactagggggtgaagaaaatggggagatcttggtcaatggatgcaaaggttcagttatgcaagatgaataagttctggggatctaatctacagcatggtgaccatagttgataatattgtattctatacttgaaatttgctaagagagcttattttaagtcctctcaccatgaacaacatcataactatgtgaggagatggatatgttaattagattgattgtggtaatcacttcacaacgtatacatatgttgcacaccctaaacagatacaatttttatttgtcaagtacacttcaataaagctggggtaaaagagaggtaatgactgagatgattgaggcaagcagacattatcccagcaaacagccagtggatgagagagggaggccttgaaggcaaatcagcgttatcaatgtgcaaagaagtacaaaggtaaagaggagcttctggaaggggctgccaataagcagtttggtgctgccagaacatagaggtggaaaaagcagatgatcagaaagcaagctaaagaggtcatgaggagtccaggggtacccaaatgctggattaaagagctgtatggttcgtgaaagttgtctgtgtgtttcatagtgatacggataggagtcagggaaatactgggtagaagagggttccctggcaaaacccccaccctcaagcctggaaacccacagccctaaatgggaacaggcattcctcttttcatgcccaaatgtggccttttggctcaccacactcccctatcctgtacccatataaaacccaaaccccgggctccacaagcagacaaacagaagagaagaagagtaacagaatggcatggcagaggagagaagagaaggagcatccaaacatcaagaggagttcagctggggatgttcagagaggaaaccggctgctggatgaccaaaatccaggggaaggtcatcttcccactccatcccctttccacctccccatccaacctgctgagagccacctccaccatacaataagacccccacatttaccatccttcaagtccatgtgtgaactgattcttcctggacactggacaagaacccaggtactaagaggacactgaattggttaacacttaagccgtctgcagatggcagagctaaaagagcactgtagcatgcccactgaggttttgggagttgcagacacccacccctggatgctgctgtggggccagagcccaaaagtgctagcccgagctcctgcacctgcctgtctgtgagctccccctcccgtaaggggtttgaatgtgcacagtggctgaacggatgagtcacacccctgttgtgtgtcctgcaaggggggtcagggaaccctcttgtttcaataggttggtcagatggctgatgtggagggtggatcttggagaaaggaccaggggaagccagcaggtgatggatgcaggagtcctgagaatttgagatcccaaccagggcaaaggtaggagggcagaggtcagtgcagacagatttgccacagtagctgtcaaacatggtggcacaagagactcctctgggctccatttataaatatttcctggccccacccctgaagtttctgattcagtagcttttagaagaatttggatctgcctgtcttttaagcctccagagctttgaaagctcagtcagatttgaaagccattgatttagaaagtaaaatccatccctcctcttctcccccattcttttctttctgtaacagtctatttggcacctactgcatggcaatactttactgaggttaagaagtaccatgggagttaaagaatacacaaaaagggaaggtctttcatccttttaagtgtttctcaaacttaaaaacttgttagcctgcaaacctgtaaaacttataaaatctgtcttagtttgggctgctataacaaattaccacagactgggtaacttataaacaacagcaatttattgctcacaattgaggttgggaaatccacgatcaaggtgcctgcagattcagtgtctagtgaggttttgttcttcatcgatggcgccttctagctgtgtcttaacgtggcagaaggggtgaacaagctccctccagcatctttcataagagcactaatcccattaataagggcagactcctcccaaacatccaagcattttatcatctcccaaaggtctcacctcttaataccactgtcaggcctctgagcccaggccaggccatcgcatcccctgtgacttgcacgtatacatccagatggcctgaagtaactgaagatccacaaaagaagtaaaaacagccttaactgatgacattccaccattgtgatttgttcctgccccaccctaactgatcaatgtactttataatctcccccacccttaagaaggttctttgtaattctccccagccttgagaatgtactttgtgagatccactcctgcccacgagagaacaaccccctttgactgtaattttccattaccttcccaaatcctataaaatggccccacccctatctcccttctctgactctcttttgggactcagccctcctgcacccaggtgaaataaacagccatgttgctcacacaaagcctgtttggtggtctcctcacacggacgcacatgaaaaccactacattgggaattaggttttatcataagaattttggggaaacaccaacattcagactatggccacccccaggcataaatgtgtggacacctcatgccaaagggttccatagattacagttggagaaatgctaccttgaccatactaccacttacagtcactgggttcacccatcaacattgaggttatagaagcagtcatcctggtggcccaggttaggtttcttttcatttttctttttaaataattattaatttgaaagtgagaaacttcatgaactgccatggttcttgtttacagacagccctgtccattttgacatttctgtgcagatgtaagagacgaaattcttttttcaaaattgacttggtatgggaaacttttttccagtaatgaaaaatattagcccaacttgccttttgcaattttcctttgatgttgacacaccagacagtgcctatttgtgtcagagccctcccaaagccatcaggtcaagcatgccactcagcttcacaggaggggaaggatgggctctgaatatgtctactcagttgcaggaatgttcaggttgaatggaatttgcaaatacaatcatgacgatgaagtcacctccattgtgggcatgaaactcaactcatcccatttgttttttcccactcatttccctacacaagccttgttcatccaatactgacagggcacccctcctcaaggatttggcaattcaagcttgggggacaccatgtagactacatggtttccaagccaaggctagatccagacctcagtcaccctcttcattccaaaactgcgcctttactcctccccaccctacatctgcaagcttatggccaccctaatcaagtggattgatcatgattgggaaattcaggttaatttcaccatcatttattgagtgcctttggaaaaggcactgtggctaactagttaagtgggcaagctttgtattcacacttagtaggaatctaggttttgtttagtagtcaggtcatctcaggcaagtaacttccttcttctaaggctcagtattaaatggggatagtgatccttaccttgaagggctgagacaaaatgcatgatgataagcactctcagtgatacatggtaaagataatggggtctccatgggattcgagcaggaaatagacagataattcaagcagagttgactaaaggcactatttacaaccctgtgagccggttgagagaatcggggcagaggtatcgtggaggagtgaactaagtaagcgagagtgggaggggtggaggagggagcaggtcctagaacctgaaaggtcaccttgggaggagctgtgacctttctggaggggagaaagctgcagcagtcaacacccttcccttggtctcctccctctctcctcatcccctgcaaggcgctctttcagatgaacagaaggcaaggcaacacagtgatgtctgagactcaatctcctgtgccagggcacaggcagagaaaggtggagggaagacatgaaggaaggaagggcaggtagcagcaccactgccattcatggatgacctatcctatgccaggaagtctaagaattctgagccaagttgtagacagatgtagaaatccacaatcacagtatgggggaataaattctattataaactaacaagtaggaagccctcatccaggtgccgagggtcaaaatatgccccaaagaacccttgagcagggtgctgaggatgcaagaaaggaggaagagggaaaagatagcaaggggagtgtagtgtggctgtaatgtaaagtctgtgcatttgggagtggggatggaaaagcaggagagggaactgggcaagcccgcaagggctgagtcactcatggaggaaactgttggccaagttaaagaggaggttaggttttatcctcagagctgttgggatttataaggattttaaatggtacagtgtctgtataatctgtattttagcaaaatgattttggtctcttcagggagggaagtgttggtttctctgattctaacccatgagcaaggtccccacggtccacggtccagggtccacggtccacagatataactgggcaaggggaggaatttcacagcagggtgaggaaatcctgacgtagcaagagcatggttcagggaaagactggttccaaaactgaggctccagtaaatgttcctggcatgatggaaaatgcttggcctgcagacaactcagtactgtacgtgctgaacttcaacgtgcacagtgacaacctggggatcttgtaacagtgcagaccctgactcagaagacctggggtggggacagagatagcactttcctaaaaagctcccaggggatgctgataacagaagaacacagagaggttcagcttgagaggcccaactgcttcaacctcttcttctgcaggtaggctaacagaggctgtggaagggcatggctggtgatgtatcataaagttggtggcaggaactgtagaaacctggctgcgagtccttcaattcagagttcccatggggcttccaggaccctctgggagatgactggggaccaggcaatctacttgctattgaagggcaaaggggaaagggagtgaacaggaattgatgaggcaagagtgtctccagcaagtccttggagagtgcaaatggatctgccaacatgcatgatacgcttttcacacatcagcctgctctgagagtatcatgaaagctgacataaatctctggtgggctgccaaaggccttcttcccagacatgatgactggcataaaaactcaacacaatacttaaaacacacactcacacaggtgagatctatgtgcagtgcaatttggcaatatgtagcaagagttacaaaagtattcattccattcaacccagtaatttcatgttcgtgtgtgcggtgggggtgggagtgtctaatacacaaatactctaaacagaggaggaagaaaacgaactttgacattgaatggatactggacagctaggactacaatacattttgaattcttataatattcctgaattgtaggcttaatattgcttctcctacacacaattttattaaaccaataagatcattcaatttcagaggttaatttgcccaaaagtcagccacctaggcaacgttagatctaggatttgaatccaggtcaaccagatctgaaggtcatgttctttccaccatgatgcaatgccaccataaacatgaagtttatcatagtgttatcaaatatataaaaaataaagggatggataagaaaattacggtatatacactaatggacaattatgccatcattaaaaaagatgaactatttccatggttctataaaggcatcatgattgtgattaaacagttaatgaaaaattacaatagcaaattttatgtaattatagttaggtaaaagatgtgtgcatattaacaaagataaaatacaaggcaaaattagcactgtggtagaagagattataggtgatctttttctctgatatccaaacattctataatattgttataaaaattggccaagaaaggctaagataacagaatgcatttgttggtggggagagcagagagcctattgtacatacaagatccttaacgggatttcctacaaaatcttgagacctctgcacctggccttatcttcctgtggttctgcccttcagtcatgaagactctctagatgacttgctctaacatagactctctcacctctggcatcattttcaggaaggcttctatagctctggtctctttatccaagtggtaacacaggtaagcatcatcaaaaagaactgcctctcacaacagcagatagaacatttatacagtaggtgggaacggacacacagggcctttaggcattgcaactgacagcatggctgctgctgggagtgaagggctagtcttcaggggcatggctcataggatgaggagagagtagaactaactctatcttgttaagagacaaaacagctatgagagaagggagacgcccaagccatcctcagttcccaccttccccatgtcttcctagataatcgcagtctaagcctcacttaggacttgatacccaggagcctatggcaccagtctgcctaacatagcccttcctgggaggctgctgaatcaaacctgcttgcaagagtcttgacacattctctgcacctccacacacaggctagggtcttgctgtcactaggctgatcctcagagacctgagaccactgcttgttttcacttccaatatctttggtacttttgtaaactaaacgtaaaatcctaagctcccaaccaactgaacggacgccttcttggccaaggggaccccagagaaacctgaaaaccggaattcttggccatgggggaaaggaaatcacacgttactacattccctcccttttggattttaggcacaattgaccagcattaattttaaaacagactctttgtggcaatacaaaaccaaattatgaacaaggcctaaagtcatgcaaagcaagggttaagtcacagctgcaggccatcaatccagctacatagcatctttatcttaactgaaaacattcctttctgctgattccaagttttagacagagccttactcctttaaccaattacaaatttaaaaatctctgaatccacctataacatataagccctcacttcaggatatctcgtcatttggggccaaactaatatataccttccatgcactgatttatgtctttgcctgtaaatcttgccaccctaaaactataatccgactatcttgggcacactttctcaggatctcttgagactgttttcccaggccatgatcactcatactggctcagaataaacctttttaaaagattttgcaaagtttggcttttctgttaacacttttgactcaccatgttgagttcagtcatgagatgggtgggactctgacacggacatgtctggactttgctttaatctactggcaaatggaaacccagctgccgatgggggatacagtgtgtgggaagtttccccagaacctcacaccatctgctttatcttcttgttggcccataatgctgacgtccctgcagatactgcaacacagtccactaggattacaactgttgtgaaaaggattggaaactgcaacatgcttatactgcagaaaaaaaaagaaatccagaaattacctaattaccataaagacagattctgtaggatgaaccaatgagtgagggcagagcttcacctatccccctatcaaccttctgagaagaggccagagacagcaggcagggtataccttgcaggctaaccccattctgttggaaatgaccagctgcagtgctgtgccatgatgaaagggattctgaggccatgttggagtgcagtggaagagcatgccctgattgattattgatgtccatcatgggaatggtattagggaggagtcagggcacacacttgccctatattcatctccctctgctaggaaataagcaaactgaaattcaagttttaaaacaaggaggaaaacaggaccaccacttctaacctcgagtttatggatcccatccaaatgtgtatgtattgtttgactctcctccattagatccatgtctactgaacatagtgagctattatttagaccacagttctacaatcaatggaacgcatgtgaatgccactgcctgctactgaaaaatctattgagagggaaaaggaaagcagaaattcaaactctcctaaccagctgcttaaaaagatccagttcactcttatcatacccccaaaattatatctaacattctagtaagatcaatcaacacatcccgaataaagtgatttgaaagtaaatacggtccatatgttcagggaatggagagccattaaatggaataaatagattacacagaaatgagaatatgttgggcatagtgaaaattaaaaaaaaaaagtcaccataaccacgtcaaagctgttgcaaatgcacaagaactagaaagaaaataaacccacatgaagatggctagtgtgttatttccactccctatttttctaacactatatactattgttatattgtcactaacatttaatgaaaactaaattattttaaaaatcaagccatcatagcgatgtcgatatttgaatatctcttacgcctgttgccttaaccttgactcaagtttggaatgcatttttatttattaaacaaatatttattgaaccctattttgtgccaggatctgttctaggcaccggggatatacctgtgaatacagatctttaaccttaacaagtttatactttagcaaattaattctatgagttaagtataaactcactggtcactggaacctcatatagtctattagagattattataagacttgggacataatcttatgattttggatggtcctataaggtcatatatatggactaatggatgctaagagatacttctgttactctacctacgccttcaaagggatctcatcttcataagaaaagcccatcccatcttcataagaaaaaaaaaaaaaaagaggccaggcaccgcggctcatgcctgtaatcccagcactttgggaggctgaggcatgtggatcacttgaggtcaggagtccgagatcagcctggccaacaaggtgaaaccccgtctctattaaaaattaaaaaaaaaatagccaagcatggtggcatgtgcatgtaattccagctactcaggaggctgaggcataagaatctcttgaacctaggatgtggaggttgcagtaagttgagattgcatcactgcactctagcctgggtgacagagtgagaatccatctcaaaggaaaaaacaaaaaacaaaaaacaaaaacaacaaaaaaaagagaaaattttaaaaagaaaagaaaacaaaaagaaaagaaaaaaagcaccaccaaatttgagaccctattgtgttccaggtactaggtaaggtactgagttctttccagagatgagctatgtatatatataggagtgtgtgtgtgtgtatttatatgcacatacttgcttgtacatgtgtatccctatattgtgagtccctttgtttataaatgtgtgtatcccttggcacttacaatataaggctagacatttataaagaaataaaaaataattgtgaactgtggtccatgttatccaaaaatgggaagcaatggtagagacagtggtgagtgggcaaagccctacctgaaggctattaggcagggcccttctgaggtggtagcattcacatcaatacctgtagtaggagaatgagttggccatggaagaggaagtgaaagagctttctggcaataggaactctgcgtgcaataagcctgagacaggggcccctagcatgctagagcacagtaaaagaaggccagtgagaccagagggaaaaagagaatgggaggtgcaagtctttcagacctaaggtagcagtttggattttatgtgaaatgcaatagctctaaaattaaggtaataaaactatgagagatattaaagaaaacctaaataaatatacagagattgaatatcataaaatgtcaattacccacatattgttctatacattcaaggcaattctaataaaaacaacagatgttttcattaaacttgataagtagatactaaaatgaaagagccaagggcaagaataaccaagatattgctgaacaagtatgaggaggaggaatcttctctaccagagatcaggacactgtgaagctgtaataaatatgactatgcatggttacagtgcatggaggccagtggaatagagagctcagaaaaaaattcatgcatataagaaattttggcataagtcagatatggcctggtagagcagggaaggagagactgtaaaaaggacttggataaagtgtttatcaatgtaataaaaaaataaaattttcactccatctctcaccctatgcaaaaattaattgcagatagatcaaaaacttaaatttcaggagcaaaactatgcaacttttagcagaaatataggcaatcatctttctcaccttggtttagggaagaatttcttaaggacacaaaatgtgttaactatataaacaaagtgataaaattggctataattaaggacttttgtttttcaaagataccttagaagaagtaaaaacagcaaattacatttgtaactggcaaaatattatcaaaagtatattataaaactattacatatcaataaagaaaagagcatataacccagtagaaaagtaggcaaaagacatgaacagatatcccacagaaaatgaaatacaatattctacctcattaataatagagggaatacaaagcaagacaacaagataccattttatatctatttagtcaaaatgaagaatcttgacaacaccaaatgttggagagggtttgaaatcataggcactcataatttgctggcatgagtgtaaattagtgcaaccagtttgggaaagagtttggagtatttttgtaaaacttaacattcatttaccatctgacctagtttctagatagaaattcaggagaaaatcttgcacatatacaggagaaggtaggcacaaggatgctcatttcatcactgctgataaaggcaacattctgaaagcaaccccaatgtttatgaaaggatcatgagtgaaagttttgtagtatcttcgtgcagtggagtagtagacagcagtcaagatgaatggactacagctgcactcatccgtggggatgaacatttgcaatacaatatggaataaaaacgtcccaaaagcttatacacaacttaaaatcctttattaaaagttaaaacactaaaaaacaatatgcttataaggaattcacacaagtagcaaaactatataaaatatacaggaattatatacaagatttagaagagtggaggggtcaggaagatgggatggggagacgtaagtgagtagaaacagatgtgcttatgtagatcataagtaaatgttaggtgttgtcagcattctggttgtcttttagttggtgtgttactgaaaaattaatgagtaaataaaaagaaaagagacccatgcacagaccaatacagaaacagtttcatgaaactaggagtgagattaatctcattttgggcacccaagtgatagttcatagcagaaagagctttttgaatctccctggtccaagcctcctaagccacaaatgtggaaactgaggcccaggttgggaaagaagccaactagttcaagtacactctgcaatgactaaccaaaggtcaatcttaaatttactgtttgcacaacccactatttgacgtgcagcgatacacacgttaaaaacgtgcataaaataaaacagaacaagaaagcagtgaattttctttatgccatcttgaaggaccctggagacatggtatgtatgtatgtatgtacgtatgtatgtatgtattgaaaccataatgaggtagaccaagatctcatacttgggtgtcagttttaaggaattacttttctcttggtaaagagtaagaaaaagcagtcaaaagaaaaaatgcccattgacttaaggtgaggggagaaaaaccacctgctagctcccgagctaatgaaaagacaagcaacaaatcacagattggaattccagcctccagagacttcagaacagaggctccaaatgtcctgatgatagatgaaaatatgcaaacatttttcattttgttctgaccaaaacagaagcgaaagagccagttaaaagcagcaaattcatgctgcattgcccagcctaggcggaattccaacaggggtaacacggtaaaacatccgagatgaaaagagaacaacttgtgatgtttaaagagacacttcacaacttaagtgctgcctctgggcacagtttattgaaaggaccacagcagccagggagaaagttccatctctagccatgtggccatgtgcacagaaggacaccctacaaaggcctctgggtgcacacgcagtgcagcaaaatgcagtttccctcccagataagaaacatgaagaaagcccacgccctgacaaatgcagaactcactcttcatttccttcccttctctctcctaggacaactgtagatgcataggattcaatttaaccgggagacttttgttttaatccaacatttttctttagcaaaactctggagacaaattatggcagacgttcatgttaaacagctgggagcccactgaaatgaaagaaagtttctcccctggtgttaccatggcacggatatgaggtgatcacaggcccccctagtttaggagaaaacagacatagccctgtgtctctgatatctctgtcagttaactctccaatgaaatagaacaatcctaaggatgaagctggaaaaatggatacatcaaaggatgaaagcttcacacagacatgccaccaaacatacaattatatgagtgtatacatgtgacagtgtagaactacataaactcacaaaaacatatgctcatacacacaccccaagacaagcatacttattcacatgtgcgcagtgcaggaatatttttcatgcagcaacctttattgttttccacagctgaactgaatgattaatgtttactgtgaaaacctcactggcaggacaacatggtttgctatccttaggtaacaagtgctacacatctgttgatttccactgtcaagttacctggctccatcacaaatacctgtgtcgtaatagaaaagaagaaacaccccaaggcaaatacagaggcaatcctaatataccacaagtggatgaccagcagctctaatgcgaccaggtacataaatgcaagtcactcacatcagaatgcaacttcttttccttccagactctgagtgccagaaatcattcttttcaaccagagctgttgctactgaaacacctgtcagcttccctgtcagcccgaatgacctgtatatggcatctaaccagggatgcctgcatttttcaagtttctggaggggaaacatcttatggaggttgaatgatgagctgtggactagaacaaatggctcctagacatcccagggccctgacttttaagatttagggaaggcctctgggcaaatctattgttttgtgtgtgcacatgtcttttttaatctcacaaaaaaaaccacaacaggactgacttccactattcaggagagggaaaaagatttgcaagggaaggtctgtggtgggctctggcatcagagttgcaagatgccattagtaacatgcaaagggatattgacagaacgatacctccctatgtttcttcaattactccacacactgtttagcaaccttgagggaaaaaagaccaatgtttcttgaatttaatccttaaaaaaattaacacttagcaactgcctgtgtatgagtgagttggctgtagcgtaacatcagatagaggtggagtctggcagagtgagagtgaagataggttaagccaggatcaagactgggtttatttagaaggtgtttagctaggattacatatcagaggagaccgactggattcaattcatgcaatgcttcttcccaaccctggatgtttttaagaaattctcaaggaacttaaaaacaacaaacaaatacagcatatggatagcgccccctcccctagagattctgatttatttggaccgcaataaggcccatccatccatccctgcattcattcaggtaactagacgcctatttatttatctatacattgtttcaagctctcaaggtaggattttttgtttatttttgttttgtttttgagacagtctcgctctgttgccaggctggagtgcagtggcatgatctcaactcactgcaacctctgactcctgagttcaagcgattctcctgcctcagcctcccaagtagctgggactacaggcatgcgccaccacaagcagctaatttttgtatttttagtagagacagggcttcaccatcttggccaggacggtctcaatctcttgacctcatgattcacccacctcggcctcccacagtgctgggattacaggtgtgagccaccacaccaggccaaactagactttattttttcagatcagttttagcttcacagcaaaattgagcagaaggtatctcaaggtgtgattctaatcttcagccaagcttgagaacagctaaattagttagacaaaaataatcatcattgccccttgctaggatagagcacaaatccatacatttatccaaagaatatttattgagtacatactatgtgaaagctactattttaggtcctcaggacacactgaaaggcaaaaataaatatagcatatattagttgtttctttctttttttttttttttagacagagtctcgctctgttgcccaggctggagtgaagtggcacaatcttggctcactgcaagatccgcctcccaggttcacgccattctcctgcctcagcctcccgagtagctgggactacaggtgcccgccaccacacccagctaattttttgtacttttagtagagacggggtttcaccgtgttagccaggatggtctcgatctcctgacctcatgatccgcccgccttggcctcccaaagtgctgggattacaggcgtgagccaccatgcccggcctgtattagttatgtcaagaccaaatgctgtcaggctagagaactggggaaagctgatgttgcagttccagtctgaaaggcatcggctggggaattccctcttactcaggagagctcagtcttctgatctattcagaccttcagctgatgggatgaagcccatcatatgggatgaagctcccctatgttatggggagcaatctgctttactcgaagtccgcccatgtaaatgtcaatctcatccaaaaacaccttcacaaaatcatccaaactatggtttgaccaccaatctgtcaaaccgtggtccagccaagttgacacataaaattcaccaatacaggacccataccctcacgagggttcaagtctgttgcgggcctgggtgatacaaaagtacacaaatgaaacaagtgcagattgtggaaatggtatgaaggaaagcaagttgttaagagaggaaacagaggggaacctgttttagatcaagtggacagtggagggaaaaagcctcttggaggtgaagaagaggaaggagccagccctgacgagtgtagagtgaagagcattacaggcagaaggaatgacacagagtggcgagggctgccaggaactgggtgagcttgggaaatgccaggaggctaaagctggactgcagtaagcaatgggaagaggagcggcaggtgaagatagagaggcagccagtgccagatccttcagtgcctcgaagttaagatgaagccaaagcagacgaggaacaggatcagatttacctcttaagatgttctgtctggctgcagtgtggacatatggaacaggtgaagtgtggaagggggtgggcagggaggaactgaaatgctccaagcatctgaggggtgctcagaacaggatgtggcagcagagatggtgccatgcggcctgacctgtgtctattttggcaagagaaataatcaaactttctggcggattagctgtgtggctgctgggggcaacggatgacgctctcatttctggcttgaacaatttagaggaaacaagagcttttttccttgttaccagcctggctcgagttatactcaatagcggcctgcattatgcaaatcatgtgtcctaattaacgtagatccagtttgaattatgcaaatttttgctttgggctgtattagtcacaatccagctgatttcctcctgcctagactacctcctgcccatctggaacacatcccattctccacactgctcctctgtggaccagagtcatgagccagtctggggtcagtgagccctgagtggtcagtgcagcaaagctgagggatgggaggaggcatgctcatccatccagacagagccaggaaccttctctgggcctctgtcttaaagagtttcctcgtgagcttatccacccagctggtcccctctctccatcaatgtctgtgttcaggctttcgttctgttcagaactcctgtctcggaagacgctccagcctccttgtaatgcactctgatggcttgttgattcctggggcccgtgctttttgttcagattgaatccaaccatctgtgtgctgaaaaaaatattgacaaaccctctgacctattgtaccttttaaaggcgctcccatacaggaatgccgccttgttttattgaagcgaagtctgttttatttaactctgaatgccaggcacctagaatagcttgtgagataaatgccaatcaactctagcataatcaagacacccattcctgcctcattagggtcttctcattccctttaagcttctcagatttatacactgtaattagaaacttggtgattttgactgctaaacagaaaggcttactgggaggcttcatatgtctgaattttaaatattttcacacttcgttaacccagttgcaagtgtaacatcttctggcccaattccctcacactgtgtgatttttatttttggacgaagacgagaacaattaattgaattgaaacacatattgattactgttttccatgaactctgaacagcttgtctctgaatgattttattgaagggtttttagacaactgtttggttggattgcttcccttggtgacctcattctggctataagtgcctgtccgcaattgcgacggtctgtgttcttggtgagttgtggttgttcccaagagctgagtcagaatgagagaggccacaccacccttctgcacatccacaccctgattagggaaccctgatgccttaatcaaacccaaaagcagggttctggaagagtctatgcagatgtcatgatttccatattcctgatgtaaatattgtttagacgtcaggtgagcaggaatattccttactgcattaaatgatcacgttattcatgcaatgactgcaatgttttcatcaggcagagctttccagaccagttgatattcccttaccacctctaccaccctcttgtgctgatcacaattgtgagatttgagaatgtttcttaaaccagtgctttttatgctttaatgtacacatgaattatctggggatcttgttaagaagactgtgattcagtgggtccaggctggggcctgcgattctgcatctctaacatgcctgcaagtgatgttaatgatgctagtttgtggacacaaggccgttggtgctgcctctatctgtgcatgatctgtcactctgttaggggaatgatcatagaattgcattctgcatctcccactaaagtgcaaatccccaaagatctgaggccatggtctaattcatcttaatacttcctgttgcagctcagatgaggccggaaccagtgggctctgacgaggattctgagctcccctttcagtgggcagagagagagtttgaggctgctgcagaatgagacggtttcatagccctggagtggtaatagggtcagggtgagacacccatctttcagggaaggtgggcccaggatctaaaggtccatggctccagggtgctcatcaagataataactcattactaaaaagagggtgtcaaagctgggctagcagcagtaaagaggcagctgtaacaacactttcacatcttctgctcaggtataaggtcttttaataaatagttcatcttaatatcatagatgatggaaatgtccttgcctcctggtgcattttccagatgtttccaggatgcttgtgtgcccaccatctcttatccacacaacagctggatgaccttttaagaatataaattggatcccttcattcctctgtgtagaaccctcctagggctttccattcctttcaggataaaatgcaagttctaggagtcctgccatccctggccctacccaccctttcccccacacagtctcatcactgtcctctgtgctcaggaggccccagtcactccggtctcctttttactacatttttaagacttgcctaagtcatttccacctcagggcctttgcactcactgtttttattcatatgtcttcatcttcactactttaccttcagagactttggctggcttataggcaagaattaaacaactccaaaaagaggtagaatttttgatttcatgggtttgacatagatttactttccccttcattcttacccagttgaagccaagaacagtctgacaccttcatattagaaacagaggactgaagactggagacagaatgggacttaaagccactcacattttggggggcagaattgtctgaggatggactcagaggctgtgacttggacttgtgcagaaggaaatttaatctgaaccacttggacctgctgtatttaacaataacatagttatagtaatgaaacttccctccttcccctcccttattttttctttgcttgtaactttgctgaggccaaggttgtatatagaaggccacagacaatcctgaatttctcttccatttgcattatcctatttttctttgtaataaaatattctattttgaggccaaaagagggtaatttgtaatttatgaatttctctcttgaaattacaactagaacctaattttaaaaatcaaattggtttcatctaattaaatttgtaaattgcctcataaacacatgctttgttataaatgtttttaaaagcaaggtctcttgcttactgtctggggctggattgggttgagcccagagtaacagttacttctcatctctctactcaagagaacatactctcaattgccaaaagtttctcaagagtagtattttccagaacagtgcttctgaaaccgtaatacccataggaatcacccaaggatcttgttaaactggagaggcctgagctgctacatttctaactagctcccaggtcatgctaatgccgctggtctatggaccacgctaagttgcagaaaggggcaagacatctgtacctgcatttaggagtcctgggtttggcatctgggtaatatgaacttggtcttttcattttaaccctctgcactcaatttcctcatttttatgtaatgataacagctaacatttataatgttatttctaaatgccaaacactgtacaaaacctaatttaatcagatcttcagagtaatcctataaggccattttattattaccttgatttttctgataaaagacttaaggttctgagaggccacttgatgtactcaaggtcacagagcaagtaaatgtcagagctgggattcagatctaggctatataggctcaaatgtcaccatccttattttcttaggcctcactagcttttgatacacaagattacactcatgtttatgctcacaatacaatggcctaaatctacaacctccttagctgtctttacagcatccctcaataattttggcatattccgcaaaagtagcctcaaatgcttacaaacaactcaaccagttacaatactctggttccggttctctgcaaattatagcccaagtcacagcgaagaagctacctgaagatgtctttcatcatagttgtctcccatagaatccatgggaatgccaacatccctggcatctggtctctgaaaatccacaaggcatcagattcacacagaagtgagaaggacaacctgctctaatctgtacccacctttgtgcatggggcttcagagagtgcactatataataatgcctcaattgcaggaggttctactcaaacacagagtctaactcacagttgtgtttagacccttgctctccctctgtttctttcttcttgtcatggaattttaatcatgatatttctcatccagtctaatgcatcattctactagaggaaaaagtgtattactctcaaggatccaatctaatgcatcatcctactagaggaaaaagtatattactctcaaggaataatatgtgcagagatatgactccacctgcaacatagccctacagtagtagtttccaaatgcaggtatgtacaaggaccagggcttttccatgacaaagttgccatcaatccagtgcaaaattagaaaaaataatgtgactgtcatgagttagtaaaaaatcataaatttattcaatttgaaggatggacttttattctgaaattatatcctttctatatttttggaattatgtcttttataaaacgatgtaaataaaagatgttgaagtaccctaggttagtcccccaagcctttttaaatgctactggcctgtgaattccaaaagtcttgaacatctggcacacagcgtcttttacataacagtatcaagtaacttaacttcctaaatcatgggtcctttccttctgctttacaaagaaaagtttgccaggcacaacacatctttatttcatgtaaatgtgtgtgtgtgtgtgtgtgtgtgtgtgtgtgtgtgtgtgtgagagagagagagagattgtggtttctgctttacaaagaacatgtagatttgaagtgactggattttgtttcagttaaattttcgaacctctctttcccaaagaagttttgaaaatgtgctaggcaaggtgtattagtatgagtacctgccctcctctcggggtactccccaggaagaaagcttctcccaagcgtgtggcctgagaaaactcataagtgatggggatggatgtctgtttcctccttccatctggtaatcctgagagctgcgccaagctccctgcaacttctaagagggagatgttagctctcctgaggaatgctagttttagtgagataaggtgttttcttaagcaccttgtacatgttggataatcttctccctcagagagttctcaggaccacctgtgactctctagagaggttatcggtctgttagattaatcttgagtacttttccttcatcaaatactccttgactttcctccccagagctcacctttccttatggcagcaatattcttcccccaagcccactccctatacatgcatgtttctgcatgagctctcagtgacttaagcctcttcgtgggcctgtggtacatgtttcagtctgggatgcttgtgtctttccccctcgtcagattccctagagaaaccctgaagaagtgattaccacctttattttacaggtgagaaaaatgaggcttaaagagaggaggaatctaccaaaggtaactcaggaaaaggtggagctactaggacactaggctacatcattccagcttcggtatccatgcccttccctctgcattcctgtgtgtttccacttgatctagtattgtaatcttatgttgtgtaagaatacaaggggtgggaggagactcaaccttactcgtattgcaatacttgaatcttagctatatcagctctgttggagatttttttgttttgttttgcaataaactttcatacagtttgtcttatttttgcaacttttctggaaggcacattgtgttggcttgatgggtacattcctgcttgagtaggttctggttcatctctgatatggtaaggcccagctaatgcttggaatgggggctttggatgccatcacctgggtgacaaaatatgccttgggcacagagcaatttaaatctgaagaatcctgtgtccctggtgcagagaataacattgggattcttttcaaagcaaagagactgatattcgtaaagtgagcatcatgtgggtattgcagtttcccagacgaactttcagtactgtttgccaggcctgggccttctcttccacataagaacaatctgactccctgggttttggctcttttgtggatgaggtcagttgtcaccatagtcacttcaatgcatgatgtgtacaaatttctttgttcttggggctaccaggacagctccactgtgtgccattatgtttgcaccccattgtactgtcagaaaccttttggtatgtctcatcttactcacctttatacgttcagcagaatgggtattcaccaatgtcaggctgaagtgacttgaataaagctaagccaatggatgcagcacaagggacctccttacctcgtagagcgtgatgaccccattggtctcattgggaggtttccactggatgtagatcttctcctcaaagggccccccttggatggattctagaggaacagctcctggaactacagaatggaaaagttatgaacttgatgtcaccttccacatcatttctccagccccgctgacctagaacaggggttgacaaagttgctgtaaagaaccagatagtaaatattttaggtctgatgggctgtacgttctctgttacaactactcaactctgtcattttagcacaaaaatgactatagataatccataaatgaatgagtacggtggcgttccaataaaactttatttatgaaaacaggcaatgggctggatttgacccacaggccatagtttgctaacccattttcagaaggctgatcaggcttttcatctgcagactgagcaagtcggtttatgaactgaaccggataagggcagaaaggacatgagcagtttccagttctgccagaggtgggaatctgaaatgaggtgtttgcttcaggggtgtctaatcttttggcttccctgggccacattggaagaagaattattattgtaggccacacataaaatacactaacacgaacgatagttcatgagctaaaaaaaaaaaattacaaaaaaaaaatctcataacgttgtaagaaagtttatgaatttgtattgggccacattcaaagccatcctgggctgcatgcagcccaggggctgctggttggacaagcttgttttaggatttgtatttgagaaatgcaaagtgagcttcccatcatcttaccaagtatcattttcttcactctgccaagttttctctaactttaggagtgcttcatcagtttcttgactaattcctgaatccaacatgaactatgtggcttgaaaccccaatccaattagaagaagctcgccttgctccaagaaggcagctagcttgacttgttgttgagtcccaatgcctggcatgaagtagatgcataataactatttgttggttggatgaataggtgaatgaatgacctacgccagcattttgaactaataagtgcaacctttcctggggctccttctataagccggtcagtcttcctgccagcatcctcctgctggatttcactattcttacaacagtctggaagacggtgagccagaaaacaaattattccccaaactttctgctgtaaccccttagaaataatgaatttcagtaaattgttgccaaatctatttatattttggtattataaaagcacttactcttggactagaattttacctacattatttcacttaagccataaaacacctctgcccagtaggtattatctcctttgcgtcgataagagaactgaggctgagaaaatggaataacttgctgaaggtcatatggctcttaagttgtaaagagggaactaaacacctgtctgtgagttttaaagcatatactcttaatcatcacgctacgcctctctacatatagccttggccatatgttgcaatcagttcccctttgttaaattaaaatatgtttagttttgctcattatggacatgctatacagaatttgttgaatattaagaatatataaaaaggttaaaaaaggaaaagaacaaaattactcataattcacatgttcaaatattattttccaatctttttatgcatataaaattttattaaaaaaagatatgcctatgcatatatatattttttatttttaaaaaaatgttaactcctactgtgcatatttcattgtgaccttattttatcactaaagaaattgcaggcttctctggggccatacatttctctggggccatgcattttaatggctgcttagagggggcgttgcccctttatagtcactaatcctttattattgggcattaaagttggtttgaattcttcatgattttgagcaatgctggaatgagcatgcttataggtaagtatgcatgcaactctgcagatagaccttaagattaatgctttggaaattaatttactgggccaaagtaaatgaactattttatttttaaggcttttgacatatattaccagattgcctttcagaaagtttgtaccattctggactccccaacagaagactatgtctgttcttgccaacactgactatttaaaaaattaagtgcatgtgtatgtgtgtcttttttagaatactggagagtacagattttgttttcagcctaattagccattcacattgcttcttttatgaacaaattatctataccttgtgctcattttcctgtatggctcttcatttttgctcatctttgtcttatgggctcgtcattgtaatttcattttaaggacgtaagctttcttgcataggttgcaaatatattttcgccagtttttttgttggcttttgaaatcacttaggtatgcagaagcttttaattagtcaggtatcctattgctttcccttatccacccttcctttccagaaatatttattatgtatttaatatgatgaagggacagcgatggacactagagatataccaataacaaagagagatgtagtcaaatccatggtaaagcttgtattctggaaagagagacagacattaagcgattatactcaaaactaattcattacatttttttaatcaggactctgacataaagggatatggtactaggagaattattaaaagcagagaacaacctagaatggcaagttaggatattaaatggcacataagttagagttgcttgataagtagaagttatcagggcaaaatggggaggaggtgctgtagtgtggtggacagctttgtgaggttgagggtggaaggagaaaaatcagttaggaggctgtcattgtcatcctcgggagaaagaattgtaacgtggactggaatgatggtagtgtagaagtgaaatagattgtacagatgtggactcagaggatggcaacatggaagatcaatgacttggtggtgatagataagggtgaaggagggaagggatgtgtcatggagaactgcaacccttttgttttacacaactgggggatcaaaatgttgtttatagagagggagccttaaaggatgaccaattttggagaggaagctggtgagctcagtttttgtcatactttatttcaggtatacatagaacatccaagtggcaatgctgagtagcagttggatatgggaagactggggccaatgtttggaaatggaaaccgtaggcagggaatagatggcaagagtatagagcagagaaaaaaaaataggtctaagactaagtgaagaagaactccagaattaacaattaggaggaaaatgaatggagaaactgggagtcagtgttcagagaggcaaccagaaaaccaggaaggtaagccgtcattgtagcatccaaagaaggaaagaggctcaagaaggtactggtcagcagtcacaaatatggctgagtagtcgagtaagatgtggctttaaacttgcccattgaacctactgtcctcaaggtgactcgtgagccaagcaagagtaatttaagggagaatgttggcatcacaagccatcctgaagagggttgagaagagaggggaaggtgaggtgaggcaagtaaacaatgctggctgtgaaaaggaggggaattcaaaccataacaagaatgagatatggagccaaaataatgactctcttaaagacaagagaggttatgattaaagcaactaagaaaaagattcaaaatagaggctgggcttggtggcccacgcctataatcccagcactttgagaggccaaggcgggcagatcacgagatcaagagattgagaccatcctggccaacatggtgaaaccctgtctttactaaaaatacaaaaattagctgggtatggtggcgcgcacctgtagttccagctactcgagaggctgaggcaggagaattgcttgaacccaggaggtggaggttgcagtgagccgagaccatgccactgcaccccagcctagtgacagactgagactccatctcaaaaaaaaaaaaaattcagaatagaggtaagaagaagagtgagaaagaaagaggagataacttacaatggtagggtcctgaaagcaagagcaagggtgggttgaaagaagggttctctccttttgtgagagaagaggagaggatggaaatgtgctaatgctttgtacggaggaattgaagtgtcctaatggctctgttttcttgagaagtggggtgaagccatctaccaaaagtgtagtgggggacgaattacatcaagaatttggaaagacaggagaagctttaatcacagagtagaaggcaagcagaatagagagatgaaaattctattcattcatttgagggtctatctgacggaaattgaggagggtgtgtctgatggacaataagaagtgtctgtctgatgaagactgtgagcatgaaactcaagctaatagatcttggtctttccaatctggggaaaattctctttctcacaccagatcagatgaatggaaagtacagatgaatagttgttctataatttatttattttctgttttattcccatctttttctttttacaccttacacgttaatatttctgaaattactgtgtataccatacatggtagaaatctataattccttacaattttctcaattgtaaaggacaattaattgaccagtcaaaacttgccccagtgatttcaaatgccatcttactaccatattaaattattttatattctagtgtatgttgtttggctttctgttctatttcactaagttgtagcttttactgtgacagtatttctctatcgcattaaaatgacatgttttgatacttggtagaacaagtcttattcttcttttgcaaagctttttgaggtatcactacccatgtattcttccagaagaatttaggaagagttttataaaatttcaaacatatttcatcacaatttttactgcagttgcattttttttctcttttttgggaagcagagagtatcacttttaaagtgagtccttttatccagtaaactgtataaatcttcatgtattaatgcttctttttatgcccctcagttaaaaatgtttttcttttatttcttacaaattgcatttctaggactttattattgttcatattgtttttgtattgtattaaaaagtttcttttatagtgttttgcaatatattaaaaagtatacataataatgtatgaatagttcaaagaataattattaaatacacatgtgcccactatctgctctaagaaataaaacattactatactattgaagcactgtttatgcccatcactattgtctcctttttctttctccatcgttaaataaataaataaataaaataggtactacaggtactatcctgattttccttttttttctttttcttttctttttttttttttaagacagagtttcactcttgtcacccagactggagggcaacagcgtgatcttggctcaatgcaacctccgcctcctaggttcaagtgattctcctgtctcagcctcccaagtagctgggattacaggcacccatgaccacgcccggctaatttttttttttttttgagacccggctaatttttgtattttcagaagagatggggtttcactatgttggccaggctggtcttgaactcttgacctcaggtgatacacctgtgttggcctcctaaagtgctgggattataggtgtgagccactgcgctcagcctgaatttactcttaatcattctcttcatttttattcggagttctaaatatatacatatatcccaagacaatatatcatttagtttttcttggtttcttttaaatctatgtggattgagtgttttctattatatgatttgcgtttgtcactcatcattttcagattcatctattttgatgcacatagttgtatctaattcatccccatcttataaatatattcctatttattccaccattctaccgtatatgaacagtagagttgtatccaggtagggtttcttacaatataatttattggaatacttttgtatatttgattgaacatatatataagattttactaaggtacacttaggaagagagggtctattcctatgactgaagggcttatctatctttgtttttacagtgtaatgccaaattgttttccaaagtggtggcagcactgccccaagcaatgttctgaaagttcctactcctccgcatctttataaatatttggtattatcaggttttaaaattctagaccatctagtaagtgtaaaacaatacttcattaaggttttacatgcttttacctatttactagcatcttttaatgtttgttggatattattgtccttttcctgttgcatatgtttgatactaatcattttattggctatatgtgctactgaaaaacttcttttaatttgtgtcttgtgtttctctttatgttacctttgaatatggatcagttcttaattttaatgtactcaaattgatcagattttagtttttgtatgggagaaagagagagacaaatttagtagcagacactgttgatggcctgcctatatcccactgaataatgcttactgcaaagtacaaatttacctaaatgctgtgggagccaacttgttctccacgtagaagaagcaagaagtgccagagagttaatgccccgaagacatccttcaagcaatgaaagacaggaagttgatggatgaacatcccagtttccttactacttggttgggttactctgagacatgttttactagcacttctcaaactatttcaaacactgaaaccattgtgatgatgataatgataattccaaatccattgtggactcatgatatcataaaatacaataaaaatgaattaatagggaagtataatttttaagtaaaagtgaaattgaaaaagcaaaaaagaaaaatactaagctccttctttttaaatactttctctttctgtacttgtcttgttatggattagagagtcaatgagtcagtgctggtccttggaccacactgggaatagcactgttctagaactcagttattcacatggtaattttttgttaataaactttgtattgactttcttccctttcctgtttcactttccctctttcttatgagtgtgtcctgagaccatctcctaaataaactacttccatttgtatccttatctcagggtctgcttctgaataaacccacacaaaagagtttttcttacataagaaacactttctctatcctgaagtcatgagaatatttgtctaaattttcattgacatttaagagttactcttttaataaaatgtcctcaattcatttacaactgtgttactatgtataacatgaggtaggaatccaattttaattatttctcctcatcctagggagattgaaaaaatacttttaattcctcagttgatttgcctgataattttaacttctgtcacatttccacatatgtatgggtctacttctatgttctattatattcaattgtttctgttagactttccctgtgtcaataccacatcttaattaacaatgaggtgtaagtcttgctatctggtaaagtctactactttgtacttcatgttcatgactgtcttgggtactcttaccttttctctttacataaacatttgaggactagcttgtaccttttcaaaaaatgtttggtttttgaattttagttgcatgtattatagatcaaatgggagataatatcatgtctttataataatagttttctcatccatgaacatggtatatcttttatttaggccttccttaacgtctttcagtgttttatagatttatacgtacatcttgaaaacttatgttaaatgtattactaaataccttatatttttattgctattgtacataatgtctttaagaaaataccacatacttgttaggttaatagaaatggaattgactttttaatgttaatgtcttggcaaacatgctatattcttatattaattctaataatttgtttgcagatttctttgggttatctatgtagagataattgtagcatctgtagttaataatagttttgctcttttccaatcttttattttcttatcttcaatgatagccaccaatacagtctttaatagaaatgatgatatgtctatctccaatttcaaagataatgatgatattgtttcatctttgagtatgatgtttgtaggttttttagttatctttatcaggttgagggggcccatttttattccaggcatacaagaatattttgttttttaaatcatgctgagaattaactgatgctttttctgtatctactgtagtgatgatatgtatttcccctctcctagtatgttactgtagcaaattacacaaacagatttactaaagttagactaacactaattttttaaactatttttttgcatatttatgcagtttcagatcatttgctaatattttgtttaggtatttgcatacatttttttctcataagcttttctgcttttaatatcaaggttatagtcttgtcataaattgaagggggaagtgcttcttctttttcctttctcataaagtgtgtaagattaggattacaaactccttgagtgtttgactgattgcacttgtgaagtcacctgggactgatgtgtactttgttgcaaaagtttaaattactgattctatttctttatttgttgtaaaactatacagaattgcttttccttaagtcaagttttttaattaatagtttgccatatcacctaaattttacatttattggtataagattatatacactatcatcatttatcttggttactgtgaaataaacacaaaagcataaaacaatcatctcattaatttttcagtactgaacttcatactgtgaccttgcttttccttatacttttcactccttaagcacatatccctaaatacaatagagtttatcatcaaataaataagaataataaatagtgctaaactcttttacaaaggccagtctgggagaactaatacctttacaatcttaacttccattccatgaatatgttctatcccaggatttatttagatattcttactgagcatgcgtattagtttttttgttttgtttttaaaaatcttgtttcttgcttcaattgttagggggtatttactttgcactatcagatttgttctttacaataagaatgaaagcatttttaaaaatctgtccagtaacctttccgcatgcaacctcataagaagtggtgtgtgatggtctggtttaatgggtcattctgctagttaccatgtaagtccttattttaaatatttccaactcacagggaaaggaaagaatttagatatattcatacattacttggctggataagagttctgtctgacctgtggggcagtggtatgaggggcagttaaggaagggaaataattaggcagcaggaagattctccgtggcaagagggctttttaggtgttttgaggggcagcctgaagttagttaccacagacactaccccttcctgtaattgtttctttacaatgagatccttccactgaagccccttttcttgtttgccatatgccctggacgtaggcttggagggggagctctcgttctctgcatcatggactagcaaataaagatgaccagggcactgacctctctcctttccccactcccatccaccagctccaacgcccactcctgtttttagcactggttggtcaaagttggaggtacttatgcatgtagacttggaagtcttctcctccaattccctaaggggttttctttccaggcagtctcagcctagtcatctctttcccatttgggactccctctcccatgacgtcttgcattaattctttcaggagcagccatggcatcgttttacagttgtcagtgcagatacaaaggtgtttttctctatatttctttaggacagtagtttaagaagagtgatcaaattggcatttctaatcaaaagtcttattgtcatcactgagacctaaaaggcagtattgtagaattaaacaatgatcaagggttgaagccacactgcctgggtttatgtcctgttcccaccactgtattaccttggccaagctgcttaatgtctctgtgtctcattttccttactttaaaatgaggataaaaatactacctactacataggttgtcctggggatttgatatgttaatatacacaaagtgcttacctaggtgtctggcacaaagtaaatactatgtttgtctgatcctccccctggccccattgcattcactctgagaacagctctagggtagcctagagatcactaatttgatttttttgtagagacaattaagattgttgctatttcctgtgatgtccttacctcaatctgctctatccgaatgatgttatattgctaatcatagaagctatatcttctcatagcttactgagctttctacgatcttcttctgatttctatggtaaatgatcttaaatctaatttttctctgaggactcagaattcattcgttcaataatgtatttattgtgtccttatttgtctacctggcactgttcttctaagtgcttgggaagcagagtaagaaaaacacaaggaaaaaatcttgtctctgtggaatgcattctagtgggagaagacagataataaaacatatagtgaaatatacagtatgtcagatgataattgctaaggagacacccaaagctggaaagagagacaaagagtgtgctgtaggagacttccagtttttaatagaatggtctgagaagagcttgctgagaggtgacattggaaaaaagacttgaagaagctgaaggaaccatcctgcttatttggcagaaccttactgtagccaaaaaggatggcaagtgcaaaggccctgaggcagggatgtccctgatatatgtgaagagaatgataactgaatttgcatagtgaggcacaagtagcaagagatgacacagaggcaaacaaaagtgggaattctggtcacctggagcatgtgagctaccgtgaaacttcgggtttttaatgtgagtgacaagagaaaccatcagagggttgggagcagagggagtgatatgatttgcttcatgatttaacaagatcattttggtgctgtgttgagaaaagaatgcagcggccagagctgaagctgcaaagattatttagaggctgctgcaataatctggggtgcagagcacagtggtttggacctaaggggtagtagtagaggctgtgagaaatggtcaaggtcttgacatacattgcaggatgaaccaagagaatatgttattggttcagatgtggggaacagcaagactgctgctttgtacaaagccagggggtctcaatcaaaagcaataaagggtgaagaggttctctttttctttttttgagacagggtcttgctctgtcacccagcctggagtgcagtggtacaatcatggctcactgcagccttgacctcccagcctcaagcagtcctcccacttcagcctcctgagtagctgagatcataggtacacaccaccacacccagcaattcacctgccttggcctctcaaagtgctgggattacaggggtgagccaccatccccagccagaagggattttctttggagatgtaaaagccagggcctcagttctgacaaaagtgagaagtcaaggtttttggctcgagacactaataaaacagagttgccatttactgagatggagaagacagtgggaagaacaagttgaaggaggatcacaggctcagttttgaatgtgtttaattccacgggctgattagcaatctaggtggagaggttgaggagacagctggataaatgactccggagggctgggcagaggcctggcctggaggtatcaattgggaaaattattaacatatggatggattttaaagccgggagactagaagaaataattagggaaatgaatgtggatccagggtcagcaaactatggctcttgggttgaatccaaccagctgcctgtttttgtaaataaaattatattggaacactgccgcacccatttgtttatccattgtccctggctgttttcctgctacaatggtggcatcgagtagctgctacagaccctctcatggataaagcctatactttaagacctggccaacctctggtatggatacgaatgggaaagagtcccaagaactgggccaataaggttgggatgtgatatggtttggctgtgaccccacccaaaatctcatcttgaattgtaatccccataatctctacatgtcaagggagacaccaggtggaggtaattaattcatgggggccatttctcctatgccattttcatgatagtgagtgagttctcaggagatctgatgttattataagtgtttggtagtttctccaacgttcattctcctttttgccgccttgtgaagaaagtgccttgcttccccttcaccttctgccacgattgtaaattttctgaggcctcccagccatgctgatttatgagtcaattaaagctctttcctttataaattacacagttttaaccagttctttatagcagtatgaaaatggactaatacacgctgtttaaaaggaaccagcaaactgtaatcccaacattttgagaggctgaggtgggaggacggcttgaggctgggagtctgagatcaccttgggtaacacaatgagactctgtctctacaaaaaaagtaaaaataaaaataaataggccgggcatggtggctcatgcctataatcccagcactttgggaggccgaggccagtggatcacctgaggttgggagttcgataccagcctgaccaacacggagaaaccctgtccctactaaaaatacaaatttagccgggtgtggtggcacatgcctgcaatcccagctactcaggaggctgaagcaggagaatggcttgaacctgggaggcggaggttgcggtgagccaagatcgtgccattgcactccagcctgggcaacaagagtgaaactccgtctcaaaaataaataaataaataaaataaaataaataaaacaaataaattagctgagcacacttgcacatgcctatatgtgcctatcccacatgtcctagctactggagagggtgaggtgggagggccgtttgagcccaggagtcagaggatacagtgagctgatcatatcactgccctccagcctgggagacacagtgaaaccctatctttaaaacaaaaacaaagaggagaagccactgcagaaggagaaaatctagaagtgtgtgatgaattggaagcaaagtacaaaaagtgttttaaggaggatttaacaaccagctgtgtcagatattgccaactggttaagtaagaggatctgactttctgagtaatgactattggatttggtgacttgaaggtcataggtgatcttgaaataattgttttggtgcaatggcagggatctgagttactttggttgaatggattcaagaacaaatagaaagaatggatgcataaggaggggatggaatagcttgaggagaagatagagctgggtgtttctgggttttttttttaatctttttaaagatgggagaaatacagcttgtgtggagggtgagaaatatatccagttacaaagggaaattttgatgtagggtggaaaggggacaattgctggagcaatgacattgagttaaaaaaaaaaaagtaagtgggatttgctgcattaagtagcaaaactggcctttatttaaaaagcaaatggttcatccatagaaacaaggaggtgagggggaggtcaaatatgtgggcaacatgtgggcaatgagagctggagggaatttctttgaatggtttcagttcctcagtctattaggtaacaaggtcatctgtggaagtgagaacaggtggatgtgctgttagtctgaagataggagaaatattctctgggagactagagggatgaatgggccagggaaagacagtattgccaggcagctttaaaagccagctccagtggtgcttctggcttccaagtgagagtggttagcgcagtggtgtgcagcagctacggaaggaaagacctagcacaggcaggaaatcagatggagctagggttgtgaatagctggaaatgagaatgaggctgaggtgttgggggattatgcaaggatgtaactggaatgatcagtcaaggaatttaagctgggtagagaagggaatgagggcaatgaacaaggtagcaagtcctagtggggctgaatttttggagctacaatactagagggaataaattgaaaagagaagagatgtggtcagagtgaaatgtttaaaatgagattacagaggggttagaggttatttaaaagtggccttttgcccagggcaaacggaaattttggatagagctcttgttttgttttttcctgaacaccctgaaataaaaagctctctatgatgtctgatgttggccacacactacttagcaaagctcttggcagacagtaagttaagggctttacacagactttcatgtgctacagcctctgtagcgagccattttacagatggggcactgaagtgtacagaatgcgagtccttaaaccaaggttgcatagtgaagtagtggatgaagcctggatatagctcaaactcttctatttccaaggcatttcccaaatcacccctttcttctatcacctggtaggtctgtgggtccagaaggctaaaaggctgtcatcgcatctttaagcagcaaaatcaggatgtctcaccccaagtaagaggctctttccacccaccacattaccattccatagtcaagatgtcctttgcaaggagatagacttactttcctttgattaaactaggtctctctctctctctcattgtaaaaagacttctcggcaaaaaattcctttttttgtcttatcttctaattctgtatcccttttccattcctttttctttgtaattctttaatgaatccacattttccctttccacaatttcatttcttcttctatttaacagcatggaactttccatccttttgacagagttctacaacaaaggttaattactttataatttcattctcttaaaaaaaagcacactaaaattgctaattttaactgtgcttcttgtcagtgggttcatgtaaattcactgtaattaaaccagatgttttcttgtgccttaaagtcaggtggtaatttaaggaagattttcatttcaacataaaggaggacagagtgttatcaagggaagttttctcctctcctctcccctttcctcccctcccctcctctcctctctttatctccatttctacatctgaaaaggggttaacaatggtgaactttgggggtagatatgaggaataccaaggtagtatatataaaagcagatagccatgtacaattcaacaggagtttcccttgatacttgtctatgtcatttttttgtctctccacttcagttgccatatttctttattcattcattatacagaggcttggaactaacttaataagagagatttagataattttagtctcatatttcctagtcgtgttggagaaaatacatttgttccagataaatctttacatcttaattaactatagccttttaattgaactatacagttgtatgctactaaatgtttcacaacctgctctccagggaaaaataaaaacaaaaactttgccaacttccatggtgtaaatatttccaccatggtttatttgaagcaacgaatgtggtactactgaacttggaggtgggaagagatgcaagcaagtctgagttagctttgaatatagctaaaagacgtcatacatatcccccatcttcacaaacaatacccataaatgggacactatggtatcacgaaaagggcatgaacttttatgtggaatggtcatttattcatccatctattcattcaacaacgagcccatactatggattaccagagtgaacaacacaaaacaaagtttctattcccattaagcttatatccctcaaagagagataataaagtaatcaatatacagcatgaggtagagaaaaataaaacagagaacagcggtagaggttttggccaggtatagaattatatattgggtggtcagggaatgcccttcaggtaagattttgaattctatttactcctcttctgcacaactgtatcgatagcatctacatcaaagtatttgggaattgactgtaagaatggagagtatcagcacaatgcctagttcatagtgtgcacttgaaaaacataattgcatttctctttgccctttataatatctcaagaccatcttggtaaacatctcaaatgtactgagctctaatacagtgatgccttcaggactcactaaggtgtgaatagctttcactcttacactaaatgactctggactgctttacttattgccttgttgttattgctttttctgctttttctctcacttttcccttttcccggttttacatgccacatcttgttactacagatgtactcatccttagcaacatgcagcctccttctagcttactgtgacctgagaaacctgatcattggctcattagaaatgtacacttaataaaggtactcattcctgaggcatgtcagtcttccttacaattcaagtacatgagttttttaaaaagtatgatgctaaatgaaataatatatgttttgtatgtgattaactgtattaaatatcaataatattatggtatatattaagttattaattataatcaattacattatatgtaattattatatgggattctacatttccttatttgtaaaatagaaaaaaaaacactctttgctccttcacatttagtgttcagattaaatgaatctacactgctagtgaaaacacaaaatcatacaacttctatggaagagtacctctcaacagctaacaaaacttcatatgtacttactctgtgactcttgcaatcccacttttaagaatttaccctaaagatacattgccacaagtaccaaacaacatatgcacaatgctatttgctacagtattatttatgatagtaaataacggaaacaacctgggtgtccactggatattggttgaataaattacagtatttccatcaacacaatgaaataccatagtgtcataaaaaataaagagcaaattctgtagtaactgatatgaagtgatttctaggatatactgagtgaacaaaaacacaagatgcaaagtatatcaattatgctaccttttatataagaagtaggaagaagaaaagtattacatatttttttgcaaaaagaactctaagaaagatcaaccagaaaggaatgaaaatagctacctttcaagtgtggattggaatagtgaaaagagacaggaatggcggtaatattttttggaatatacgttttaatgtagttttttaatggtgtttttatttctaatttaatttaaagttctgagatacatgagcaggaactgcaggtttgttacataggtaaatgcatgccatggtagtttgctggacctatcaacccatcacctaggtattaagccccatatgcattaactatttatcctgatgctctccctccccacactcccccaacaggccccagggtgtgctgttcccctccctgtgtccatgtgttctcattgttcagctcccacttacaagtgagaacgtgcagtgtttggttgtctgttcctgtgttagtctgctgaggataatgacttccagctccatccatgttcctgcaaaggacatgatctcattcctttttatggctgcaaataccacattttctttatccagtctatcattgatggccatttgggttgactccatgtctttgctattgtgaacagtgctgcaatgaacatatacatgcatgtatctttataatagaatgatttatattctgttgggtatatacccagtaatgagacacagtttttacttttgaaacatgcaactgttttgcatattaaaaacaattaaattgaattaaaaagcataggtggaaggcaaacctttaaatggaaacaaatgaacataactgggtatcaaattgataatataaccatacagagaaaagaactgaacttttgaacatagtattctcactgcataccctcagtggtatacagcctaaggagataaaaactgaaatctttaacctaacttagtataatagctttattgttttttagagggattggtgttgtaattctgaaactattttatgtgtgtttcaggaaatgaaaactatgtggatgttgagcaccagggttctcactgcaggagaaggaagatatatgtataaaatgtgttgaatttgaatcagtatgagctcatgacttaaaacaaaaataaattatactccctagctctacctactgaaagaacctacaggcaataacgcatcaccgagcacacctaagatgtatatcttagtgccaaaataccactccccattgaaagcaaccacaaatccctaataagtggttggcctcaggtctggggcagggacattaaaagaatagtctagaatatttttgttgtgccagaagcaaggaagactaatgagaacatgtcaaaaggacctgggaatcagcttgaagagactgccactggccatatttgaggcaatttgagcatcacagagaatggcagtagaggatttcaatacacggagtcaaaaatgatctatgaatcaacagggagaccaaaaacagggaggaagatgaagagagaaacaactcttctctaaagaagaaggctaactagtaagcgtagggagaattatagatgtttaaatcacccttttgtaagcaccaacgtaataactggttcaggtgaagactctcaggacgtgttaaaaccattgagtgaaagctttaggggaatacaatactcattccatctcaaagtttcactccaaggatactttacaaaagaaaaaaggtgccacatttacagtggagggaccgggcagttcttgtcttatctaagtgaccatatgtgacatcatcagtactgggactccctgacattatgaacttcttgacaaaatacaatgagaaatatacatcgccaacataatggttttgccaaagatatacggaaccctggttctgtcacatagaatcaggttaaatattattagaaatgtaaacaaactgtatattacatgattttaaaattaatgcaaaatttattagaggttaaatagcattgtgggtatgtagcataaagttcttatttttaggtcttgtatgctaattggtttagaaatcaactgtcatgatttctgcactttactttcaaatggttaaaatattgtatgtattcataaatatatttacatagcatatgtcacctatcatgtagatataagatacacacacatgagtaaatgcagcaaagtgtttacaaatgttgaatctagatgagaggtttataagtctcctttgtactattctttcgatttttctagctttgaaaattttcacaataaaatcttgggctaaaggagtacaggagccactgtatataatatgtctatccgtgcctagcacagtgtaggtgctcaataaatagcagtcaaagtgagctgccaagcaaaaccatcaacatggttttcatctttcaaggtgcaagcgaactgtggttttgtctgagacatttgtggaaaagggaaaaataaagaatctgtttagtttcttatgaacagctgctacccaaatgaagccatggggctcagcagccatgagctgctctctagtgctggatttcttcgcaggccgtcaaatgcactgaggtgctgaaattacaaattctgcaaattccccagaagacaattttgtggcacggatgacagcagcatgaattcagccattcagccaactcaatcctaaaggttgcttgctggctcccggaggggggtttcagttaatctactagagccacgctctagcctcatcttgtccttgaggtgaacgagttacccagccaacagaagtggtgcttcctctctctttagaaagaatggaacttaaccctggcatacagcagggtcctacactgagactctccttcagtccagtgggttttgaggcagagcctcagaatacagaactgaggaatcatgtctcgtatgttggtgtttttagtaatgataatgtccacacatctccatagagcaggaattgatgctttattaatgatgtttaattaaaatttaatttcaaagcattcctgctctcatgttgttttgataaaggcttttttttcttggtgacaggaagaagaaagagagaagttaaggaacgccttaaagctggacttggggtttgctgaggcacagggaggtaatcctcaaagagcagctcaaggtgggcaaagaatctttaaaaaggtgccctgagctgctccttgggaaaaccttattgttcatctcctgagtcctgaattttcatgctgattttcagcagtgacttctccctctctaacaaccaggaattccctgtgaatatgagtcactaaaccatccttttgccctgactctgtttctcatatcaggcaccaagcacactgccactttttgagcatctacagtgtatttcccacaaccagttagatttctagatgtctggacatgtctacagctctgaagaggtttcctaggggagctgggaagtttctcaactgccggggatagatgctcctttgtgaatacctttttgttttttttttctcctgtgattcaccacaaatatagtaccttataacatgctgggtattagtccaatttctttatataccatgccacttaatgtgcacgagaatctataagataagtactttaattattccttttttgtttgagacagagtctcgctctgtcacccaggctggagtgcagtggcgcgatctcggctcactgcaacctccgcctcccaggttcaagcgattctcctgcctcagccttctgagtagctgggactacaggcatgtgccaccatgcccagctaattttttgtatttttagtagagatggggtttcaccacagtagccgggatggtctcaatctcctgacctcatgatctgccctcctcagcctcccagagtgctgggattacagggtgagccaccatgtctggccaattaattccattttacagatgaggaaacaaaggcactaagaggttaaacaacttgtccaggcatgcttggctccagagtgtacattgtctgacagcgcacaattctacctgctggaggaaggggctacagatttctgaaacaatgaagtcagatctagggaaatcttcctagaactggaagttttacagagtctactccaaggatgaccccaaagaccagtgtgtggggtctgcaaagaggatggctacgaggatgaactggaagggtgtaagggagggatggatcatcaaagtagactgtgtaaaacttccagatctaggatgggacatggtggaagtgagaattaggggcagggtgagaagaggctggcactatttcccttgtcttctcatgagattttgcagctgagaatgtgaatctgggttctactcagggtcataactctgaagtatttagaactcgcttagatgaaacaagagtactagatcctactgaatcccaggaacacacaaagaaagaagaaaatgaaaatgaaaaaaagaaaacatgtcctaaacagaattgccacagtagaggctctgtcttcaagttctaaggctaatctgagtcaagccgggtattttctttatgcagctgacaatgccagtgctctggctagacctttcagacctctttatacaatttttgtgagactctatcctttacctgcacatgcagagagacaaaagttactgaaattttacctctgaatctctcctccccatcccagaccctaactgttggctggcagcttccttgcctaacttaggacatctgtgatgcatggcccaccctgaacagttccctgaaggctcaggttgcagccagtttttgctggacttggccaaaagttgcaccttggctttctccccttccttgtcccacttccctcactcccctcccagtctcccctgggaaaactttcttaatcagtcacatgcacacgaatcttcatctgagtctgattctcaggaactatctaaagccatcccacaaggcaagaggcagcctgggctggctggaggggaaactgaaatatggtcatggggaagtgtttcttaggtaagccctggaactggcgaattctatgctatcactaaggtaactgcggtgagcctgggaagaaacatccaagtcaatctggggcaatcaaggaaagcttcctggaggaagtaacatttgagcaaagacttgaaaggtcaatagaggtttccttgcaaacatggaggacaggtcattccaagcaggagaaatggcatgggtaaggacagagaggcaggaaaagttatgtgttctagcagtagtggctctaggttcttggagtctcaagttatgaggaagataaactgcaggaagcatacccattagaaatgggggtatggaggtggggtgggtttgggagggagacatggaggctcctaggctggctttcaggtctctatcttgagttactaggtgcagttcattgagataaggaatacaggaaagtcagtatagaattggagattagttcaatttcagataccttgagcttgagatgactgtcatccagccagatgaatattcagttctgggtggatccaatgtgtacgctaagctttttatatctattttctgtttttaattcttacataattcagcattgtctgacttccaaattcaacatgtttaaacaatgtgatacatgttttatctttctggaggcatcagtgcagtcaaaccttggacagagaaggtggttgatatagtttgggtatttgtcccctcccaaatctcatgttgaactgtaatcttcagtgctggaggtgtgattggatcatggaagtggatccctcatgggttggtgctgtcttcgcgacagtgagtgaattccccggagatctggttaagtgtgtggcaccgccaatcttttgcgcctgctttggccacgtagtgttcctgctcctacttcatcttccaccatgagtaaaagctcctcagcctccccagaagccaagctatgtcagtgctatgctttctgtacagctgcagaactgtgagccaattaaacctcctttctttataaattacccagtctttataaattacccagtctccggtgttttttttgttttgttttgtttttttggtagagatggaatctcactctgttgcccaggctggagtgcaatggtgcgatctcggctcactgcaacctctgcctcccaagttcaagcaattctccagcctcagcctcctgagtagctgggactacaggcacacgctgccacgcctggtaatttcttttgtattttagtagagacagggtttcaccatgttgcccaggctggtctcaaactcctgagataggcaatccacctgcctcagcctcccaaagtgctaggattacaggcatgagtcaccacacctggccacaggtatttctttatagcaatgcaagaatggtctaatacactggtataaagcaagaagagggatgggggtacaaaagggccaaagctgagtgcaagtctatggcagaactgtcactgtgatgggaaagcactccctggagttgtgcaatgcacagtttacatagtccttcattgaaggcctaagaaaagaaaggtgtgtgtgagggaattaaaaatgtaggaaaaataaaagcctcataactgactgccatggccctgtgaatagattcaatatccccattcccatgtaagctctcctcccttgctcaccgtcttcctcagtctgcaccaccagctcctcgctctccattcggccctcggggttagacagcaagagtcgcagccggatggtcatgaaggggcgcaggcctcgcagggtgtagtgggaggaggtctggatgacctcctcggcctcgtactgctgctggttgaacacatactggtactgcacggtgaggttgtagctatggcagcgggtcaccgcgtagccgaagggctcccactgcagggtcagctgccgggctctgatgtctacgatttccacgttctgtgggccatgtaccggatctgcaaaacatgcaggcaagaaacaagggttctgaagagaccatcgggaagctggggtacatgttctgctacaacagggaacacagcttttccaaacatatctccaccattcaatcactgccatcatgatttttgacacaggcaatataatttagagaacatttttctttacatcaatctcccttgtcttatttaaatacatgcatctaatagaaaacataaatatataaaaggaaaacatcttaaataaatgttaaccataaaaataaatgtgaaattgttaaattcttaagggtgcatcaaagtgccactgaaaaccttcttggtaccacacacagcacactcctcgcttctgggatacgcttatttagacggctgctgagagctgacctgcctccttatactgaattcagccccagcctgtccccttggaggtcagcctctcctcttcagccaacaacatccagatgcactagctggaaactgagtcacagcctcaacccgcaacacccagtttatccatgcgttcatcatgacccattaaccctgctttaggatttcctctcctttccttgactacacagttcatcatttcctaacctcctacaacagtcttccatccctctttttctcccctggtccctctgggaacatcattctaaaagctaatctgagcatgccttctcaccctaatgctgtctcccactccatgcctcctattgatcttggtcccagatcaccatacataatgttgtctatgtctaattttattaggaatattctatttatactttatgcacattaaatagatttttttaatataaaacaggttataataaacatgatgtttttcaaaaatcctcacatgtaaagctcattttatgttgaggtttaggcatttgtctttggggtggcttgttttgtttctttgagatgggagtctgactctctatcctaggctggtgtacagtggcacaatcagagttcatcccagcctcaaactcctaggctcaagcaatcatgatcctctagcctcagcctcacatgtaggtgggcctacaccatgcttggctaattttttatttttattttttcacatatggggtctctctatgttgcccaggctggtctcaaactcctgggctcaagtgatcctcctgccttggcttcccaaagtgatgggattgcaggcaccatccaccatgcctggctcttgggtcaggcatttgttatgttagaaacataacttctcatgtgatagatacacccagaaattcttgtgtcagactttcttatctgggaggagtcaggcacaggctggagattaaatcagtacttctccccatacctacagaactttgcccaattatgtatcctctttggatccactttttaattcatttgtaaaatgatgataataatagtagctaacctcatggcagggggaagaggaagttagatgagatgcttgtaaagcagttagaactcaaacttaataagcactctacgtatgataactggggtgtgttgtttgttttgcagtaatagtaataatatatatgtaatagtaataataatagtgttccgcatgctgtgtctaccttgaatgccttgtgagtggcagtgctgggagcacccttatgcaaaatgatggactaggtttccatcattgctccaatcccctcagagcatttaagggtaaggctacctctgcaccaatgcagcaataagaaagaggggatgctattggtgctagttgatctgtccctatggggaaaatatcctgtaacttgtgtcggcgtcctaccaaggaacatagttcacaggaatgtcagggaacctggcaagcccgcacagagctgcccacgtggctgcaggagtgagggtgttgaggatagtgggcagccctggcccctgatcaactgaggaattcatgatcactcttacagcccaattattcatgctcacaggtcctttgggcaaagcagagccagcatccccaaatcaaatgggtgaccctgagaatgtgacattgaacaagctgttgctgagggcctattgtggaatggaaggtgaaatgtggtccctgtagctggggattatgattggtgggattacggctgctggctaaacatctcgcagttgtaccgactgcaatgagagcagatgtacaggcacacagagagcaataaatggcttgcctgggaagccccgagcatccccatcagcgttgcctagctggggcctgtccacttgtccaggtgccagaactctcctggcagagagccactgcccctgctcagggcctcttcgacactcctcccctgggtttgccctccaaactgatgccaagccccaatacaacagtcacccacatggcactctcacctccctcctgaggcagggagaagaggaacacttaagacccatttaaacccaaggctaagaccacatgttattgaacatcttaaaatgtaccatatctcatgttaaatataatttttgaggtctttattatggccttaacccacaaacaaagctataaagacaaaacaccactgatggaactgtagccacaagtgctgggctctatcttctgaaccatcttatgaccctaggagggaaggatggcccaccccacattacagatgaataacctgaggtccagaaatgtgcaggaattagtacagagtagcaaggccagcaggtgacaaagtgcggttttgaacttgtgtctgcctgaccccacatgtagtgtgcaaagtaaaaactctctgtaagctatcagttgcactctctatgttgaaaatctcactacctgggaggaaggcatcactagctctgtcctagaggaaaccaaagctctttgagacaaaataattggcctaaagccacagagtgagaggcacagccaagatatgaggtctgccagagtagaaaacctgtgttttctcagcaccttgacgccaccggagactgagaccagggaaagaacataaatatgaggcatgtcgccttcatcagaagtctggggagacttgaagacaatagtgagagaaagccaaaatactacaaggcaaaaatgacttgggtctcaggagcctaggacctgcgggagagagtggtacagtgatgtaaacacatttagtgcaaagctgaccgctggccttttgatccctggtctccattctccctggagctcacctctggaggtgtgcatatacacacatttctgctcctcttaaaggactaaacaggagcatctttttaaagaagacaaggatatcgtgatcttgccacacagcaaagagactctttgagaccgggaaagttgggatacaggaaaagccacttgttccctcttgagcatgtgtgactgtcacggcgggccccgggtacagtgctgctgactagagcgtggcttgaagcgagactctggcactcactatctgggtgaccttgggcaagggcacttcattgctgagcctccatctcctcatctataaagtggaaattattacactagtctcaaaaggttgttaatgagcataaaatgaactgtaaagagagagaaaattgcctttggctaacagtaggtactccttttagagagaattgcctttcttggagaaatgcctttggaagcttgtgtggggtagaagctgcattcttggggcctcagtatcacttatgctgagactccagtggaagagaaaaaataaacccactgggggcttggatagcataagagaggtgtgagggtgaacaaatggcagaatattgggtgaagcccaatatgatcactccccaggtgatttttagatctccagcaaggccctcaaaatacaacaaagacctttgctgtgcctggatctcctgtgggttctagaaagggttgaggtcggcatgccttgggcctaataagataccacgtgggaacacagggaccagaggcaaaggaaccttggaaaatgtgctcatgtgtgttactgaaatcttgggagatgattttggggagatgatttttctactggctatgaaaattcagagattcaaggaaatctcagtttgtattccaaaggcaagaaggactctggtgaacctagagattcggtacctgcaggtgaaagcattttgtaaatctgagaactcgcattcaggaaagggaaagacaatggctattaagtagcaactctgggctaggagctacccttagcacttgtgtcctaaaaacaactcgacggtataggaagttgagactcagtgaagagatgtaacttacccagggccacatggccgagcccccattctctgggctcccatgaatgggtcagttacacatgtatgcacacaagcctgtcccgaacatgtgcaaaatcacagatgggtctgggataagaatacacattttagtctgtagccccttcccccttctccttccaccaaactgcatctcttcctgcagggggcctcacatataagtgtgcagcgacctcagtcctcaggtgcaagctctgtccacttcccccagacatccactctttggccatggcactttgcactgttgtccaacacacacttagcatttgtcacactgcccaggaattgcttgttcatgtgtttgtcccccctctcaggctgcaacagaccatgttctgtttgccagtaacctcacaacgtggcacagggtctgtcaaggggcagttcctgtgagatgaacagatggtgacctgttcttgggaactgagctcagactctctgactccacagtccttgttctgtccccttcagcatgtcagccaggtctttaagggtaatatatatatatatattttttttgcattcaagcaagagaatatcctgaaatcctattcaatggaaactaggttttagagtgtgatggaagcattcatgctttcagtccgacccctctaaacctcatctgccaaacccagcttctgctgggtaattgcctgcagcatggagaatctggggtttacattcgggttggtgcaaacaagttggaaattgctaagaaagccttgtgtgtgcagtggagattggtttgttgaatttacatcccccgtgtaaatacagccaagcctagagcctatggtttctgcctccagataaagccctgtccgtatgaccttcttgagtaatagcccacaggccaagaagatgacaaacagtgggaagagtgtggcttgtctgggaagctggaaaaccatcctctgatagaaaatcaaagtggctctacctctggatgcaccttctgtatgctcttaggctagacaacagtggccttgtcctatgccctgtactttagagagccactttggcccacttcagactgtccctcttctcggagcaagggatcgggggccaatgggctggccaaaggatctggttctgtcctctcccttctggtccaggctccacatttatgaccccctagaattccctgccacgaggccctacactcagtttcttcctttgttctgtccttcctgtgagtggccgttggcctaaggatggccaaaggatggctgtctgggggcagtggacagaacttgcacctgaggactgaggttgctgtgcacacacatatgtggggcccttgtggggagagatgttgttgggtgaaaggagaagggggaaggggccacgggctgacatttttattcctatctcagattctgtgattatgcacatgttagggacaggcttgtgttcatgcatgtgtgactgacccactcaggttttcagaaccttctccattcttactgtggcctcaggaaggcacggtggtcctcctcacctctgaaccctgctcctctttctacatcagctcttattaaagcaccatgtccatcctgaagtaccattttcatcctaatacccgagcccaccctgcaacaggtaccttcctgcccccaaatgcccctgagtcattttccacttctcacttatcaaatcctgtattcttaaagcaaagcaagggattataaatgccttcacacctccaagcctctgcccagctatttcctctgcttgggatgccaccaacaaatcctcattcaatattttcaaggcccagctccaatgccaccctttacttgtgactttctctaacagtctcccttgcccataattaatgcctcgatgacattttttttccttaacctgctatcatatgtctcccatagctcttatcagacttcagggttattgttcatatgtttggttcatgttcacctccactgccaacctgtgagcccctagatctcctcattttataactataacatacagctgctgaataaatgaatgaataagtacataaatgaataaatctagaaagtagtgatagctgaagaccaagccacccgaatttaggtgctaatagagggcaggggaaaagcaataagtagagggttgaatcaggatctccttacactccaattgttaagggtaatcatgtggttaagtcagaattggctcccttttttgttctgtatggactcagcctccatccctgctgtcaaaggcaatagctgtagaatcttctaatgaccttaatcaaggcagaacatcttattaaaaaagaagcagcaaaacagattttcaattcatgaatttgctacgtattcatgtttgcatgtggagttgcctgtagcatatgtactgttcaaagttgaacctaaattaagataatttggggatggggctgaaaatgtggaggtggatagcttgtatgcaaaattaattttttatccatttggagatgcaatttgagttcttttcaaattaaattgcaatggagtcctaggcagctggaaacattattgccaacataatttgatactgcaagagcagaaatatgttgacagatagttcgatgtgaccattaatttgcactttctgcatggaaatgatacacgaagggaataaaaaggtaaggggaacaaaaataaaatccatcttctttccagcatcatcgaaacccactctcttgcttattttccaccacctcttctaatttattgcagatgtttggtggacaagaatttgttgaatactagttcactattcctaaaccaaaaatctgaaatctgaaatattccaaaatctgaaactttctgagtgccagcatgatgctcaaaggaaatgcacatgggaatatttcaaatttcagattttcaataacagggatgttcgactggtaagtataacacaaatcttccaaaatctgaaacatttctggttcaatcatttcagataagggatattcagcctgtattatcatagatatcttataaatataagcaagcataggaatccaggagctccatttggagatgctggtaattccacaatatagaagcactagatcctacccgtgctgatgattagaatcacctgaagctggagcatgtcaccttgtgagaaggcaacacggttgctaccctcccatagcaatgccacagagaaggtaatccactcacgtgttcattgtctcatttcttaattgaaaactactcactgagcatggaggcatcatgacatggggaaaagaacattggttctgtgatcacctgaacctaagcacatcacttaccctacctgtgtctgtgccttatttttctcatgtaggaaacgtagatgatactccttcactcttagggctatgaggtgaattaagaagataatatattccagagccttggatggtactaaatacagttgcactccctcaaacccagagtgggaggtgagacagaacagccactgagacaaacaggggttgtggaggtttctgtggatctctgacctggttctgagtctagttgactactggcctcattcttttaaccaactatagtttagtgttagaaagcttccattaatgcccttgcagttattgctgtatctactccttccattctacatacatatcctgaacctctgagatgggccaggcattagggatgtaggtgaatgggacacttgcttgcctttgtgaaactgatgctagggggatgcaataattttgaaggatgatatgatgaagcttgataagtcttttgcaggggaagtactgggcttctggacaatagatacagtacagcattgaaacccagctaagccaatttgatgatgacgcatgcacaaccctgacattcgttatcatagaaaccaaagccatcaaagaaatttaaggtgaacgaggattaacgattccccaacaactgcattattagatgataataaaagcaagccttaggccaaattctactacacagatggacacagtatacaagcatttattagcaaatgggcacaaaacagctcaaacaatctatttcataaagtcccagcaatagatgaatcagttaccatttttcatgaaaggttcattcgaggcaagtacaacaatactctaaggcagaagtaggtgagcttttttttttttttaagggccagatagtaaatatttaaggttttgcacctttgcaggttagacagtctctgttgcatctttccatctctgctattatagtgcaaatgtagccatagacaacatgtacgcaaaataggtgtggctgagtttcaataaatgtttatttacaaaaagctagaaccttaggctatagcatgcttactcttgttatggaggtaaaataaatgactatgattgtcactttaggcagccggcaatcctcctaatctcatggctaacacagtactgtttaggaatcaaggttttgacaccatccctaaggtcgaagactagaggtcttacaggattattctttataatgtccttctggagagtattttaaaaccattttggccaacccacatagtttaaatacctttcatttcaccaattagaatttacttctaacatttattatgctagtccacaggcccttgatttcaaccacagtaatcaattgctaatatttagtttgctaattagcaacatggaggttgttgatcaagatatggtatcagaatagttgggaaaataggcgtgtactcatcacatctggttagttttttttaattttttttttagaggcaagtatctcactatttgcccaagcgggtctcgaaatcctggcctcaagtgatcctcctgcctcagcctgggagacagagcaagagcaagaccgtgtctctaaaagaaaaaaaccatacacacacaaacacacacacacacacacacacacacacgcgcgcatgtatatatatggttatcatatgttattttgatatatgatatcaaaagcatgtggtgtacttagagttttctctgaggtatgggttcttgactgcaacactagtgtacttatggtgtgttcttgattgtaaggctcttaataccggtactagctctcaatagcttgaccaatacaactcacccatcacaccccactgtgtaagcttaaatatttgagataaattaccaacaatgtaatatttagtctagaggccaagaattctttcctgaaaaagggaccttgggcaaaggatggataggattaaaccaggtaaaggggaagagtgtgtatagaaggggacgagagagggagaaaagggagcgggaagattaagccagagataaaggaggcagcacatttaaaatctaagagacaagagcaaggaggctaatggccacagagattgccatgcttgagtggaccgtccacaagagcaggaatccctgcctttcaccacacatgcacaccccatagtgatgtgctaggccagtctgggtgttacacattggtcctcctaccatccctaagaagaaaatgaggataacaactagggcagttgtaacagtatggtaagagtattctttgccaaaagtaaagcactggacagagtcatttgttttgtattttgagtttctaccatgtgctgagaactatactggatgtaggagtgaaccaaacaggcaaaaaccctctgtgcccttatggtgtatatattctagtgggggtaggagattaaataatatatcagataaatcagaaaagtatgtaacacatcagatagtagtaagtgctgtggagaaaaatcaaggagggaagagagactggagggttgggaaaggcttatgtctacaattttacttctttgatttgaggccttggcatcagctccttgatctttcctgatctttcttcttcatttaccctgaagtttttactttttttcccacggcttagctcgaaatattttttgagcatctatagggtggcaagctagttttgggggacatagtgttaacaaaaatagacataattcctgcctcctttgcactaaatctggtgagaaaaacagactaaaacaaccatcatggcagccaaacacatgagctaaccaaattgcatgtgttttgaaggaaatatagatgttataatatgatgataatgcaaataaaaagtgttctgaaggaaacacaagggatcgattggataaaaatggcaagctatgtacagtagtcagagaagacaactgaagaggtgacatttggactgaaaggtgtcactcttccctctctattcccacttctctcccagttttcactcattcttctttgtttttgagacagtctcgctctgtcacccaggctggagttcagtggcgtgatcttggctcactgcaacttccacttcccaggttcaagggattcgcctgcctctgcctcccaaatagctgggattacaggcatgccaccacgctcgactaatttttgtatttttagtagagatggggtttcaccacattggccaggctggtctcgaactcctgaactcaagtgatccacccgccttggcctcccaaaataactgggattacaggtatgagccatcgtgtccagcctccactcgttctttaggccttcctttaaacattagttcttccgagaaagctgtcactcaaaagcttctctcgcccagttgggtatgtgtcccaccccatcccactcagatgaatgtaaaattgggtccaatcagggctagtccaacagccctatcccataggtcctccagtcagtttggggtacagagggggaacccagagtcaaatataatccagattcacaaagcagcctattgactgaggtcatggccctcgggcccacagtaagcacaaaaactgcagcccaagggccttcagccagttattcagccattgtctttggctccaaacatgccctctgtatcttgctttacggtgctaaggctaggatggcacaaatcacatgtgctctactgtctggctgcatgctagtatctgcccatagggggcgatagagggagcctgcggggcaggaggacggggagacttcagcatcaggtatccaagtagccagttcattctgtcacagcatttggatctagcttgcagtttccccaacacttacagagccagcctcattgcagcacctcagagacaccagcaccagcctcttttcgttcttttcaaccctggcagtagctgctccccacagttgccacctttgtctagtgttttcatgttctcttttaatgttttccattttctaggcaattctttatatacagttaaccagaggttcacagtgcccttggtgttttggtaatttttttttcccacagatcctaagccaaaaaacatacccaacagtttcatgtattagttgttgcaaacaacttaataagtatttgcgtcctaacaaataagaagtggtttgagaaaacagtacacacaaatcaaaataaagctatttttttctttcttaactacaattactccctaaaaggatgcatgtatctgttgagcattacacaatttctcaaactgaagattcagattagacagacactgccactttcgttgcctgttccatgttgattttggcacaaaacttgcatttcatcatggcaattgccagaagcccaattctgccaagatatgacatcagaaggaatgtagcccaatctcatgttgaaactctgggccccttcaagtagtcatttgtagcgtgtctgacagatgatgctgtgttttccacaatactggtactaccggtgctcttgtgagttaagagtggtgtcttacactgtctcaacacagtttgaaaaccaggatagttaacaattctgtataggcaattctgtctgttataagtgtcatgatttatctccaaaatagaccttgactgatgcaggaccccactgcctaaacttccttaatattccacgttcccatctttgtctcccagtattccactcagcctaggcacctcatgcccagaaatctgatgtcctcctagctgccacattctgcttcccagctccatctcagaccttgatcttccctctctgccccatccagatgcagtcccctggactgtggctgagccagggagcagggtggtcagctgtgtgcctcctgccacatcaactgctcaagtgctcaaatgctgggaagaattaaaggaacagaggcaaaagactgcagcctgaagacagagactttggaatgtttaaaaattacttttgcgctagaggaaatcgggttgggaaaagagaagcaattttgaaattacgtggtttcagtttccagagaaaggaaaaaagatttggggtgaagaaaaggagaagtcaaacccataacatctgggttagtttcacttcaattcccacttgattcatggcaagtcgctttattcatttaaagaaattaaaggaaaagaagaaaagctggagaaagaataaaacctgaaacatttctgatggtcaaaagccacctagcactgggccctggtgaggtattaaacattctaacactttacttgtcctggctgtgaacaatagggcactggaattagaaaagtctcagcgtagctaatttgccattactgcctaagaagccatgtgtaaatcaaattgtttctagactatgtaaaaacaaacaaaagtaatatctcctaattggactctgatcgcctcccttctagaagtactacctttttttttcagctggagaatttggcttttcatattcagatccagggtttttcaaagctgaggctgctcatagctgacaactcccccatcccaggacattcttgatcttccaaggaatcacattaatctacagacactactcaggactgctggaccttgaagagccctgctgtgtcagcagccccagaaatgcctaccaagcttttttatgatgtccaaagctttattctttgaaatgtacaagagtgtcattaaactgaaggaacactttcaaatgaaaaccactgtcagttgagggaggcttattttctgtcgaatctcatttgggacttacctaggcaatgaaaaaggcaattgacaaaacaaagctgtccatctcagttaacttgtggcaaacaagaatggaaccccagtagaacacggatcacagtacaacagtagctagaagacacattatctgactgcttgcctcactcacttgcgaagtacctgctggccttgttgagcacctctcagaaaagatgaggggttaaaatgcacatggtctgtttcctgactgacccctctaataggggctgacacttggccatgacattgtgagacacaatcctagcacaggcttttacataagccaccaaatgatacttcttcatatcagaatctcaaaaatgatagctacttttcctccttgactttcatttttgacttagccttctaaggatggcctctacaaaatatagagctctccttaaatgtcatcagtctcgatgccttttccactttccatcttcctccatctgcaaatagtcttgctcagatacttgatgttttcacattttctatctcttgcacattaaaacttatttatgaactgtgtgacattgaaaaaataattttacccttcctggccccagatttatatttatacatacctcctacatttcttgtagggtttaaataaaattatatgcatgcattgttagtgggatgttgtcaccatagtgctgtataacaaatcacccccaaagccacgggtttacagcaacagacatttattctcaagctcatacatctgcttgtataatctcctggtgtggatcagccaggcatggctccaggctatgagttgtgcccaggtctgcctgatgtatgcttattctacaaaccaggttgaaggagcggtagcccctcagagtaagttctttccatgatgaatgcaccagagccgagccaagccaacccatgtaggagctcttaaggcctccctcatgtcaagcttgctaataccatattgagagagcaagtcacacaggcaagctcaacatcaatgaagccactcgtcccacagttggaaagggtgggagtagcagaggtgagtgaatatttactgaaagataactcaaactatcagatcaatagatgtgtatgttttggttaacatgaccggccaacactccttcacatagtacaggcttgatcccccgagggaggaaagtctgactttgagtcaggtgtgtggagagccagaagattctgctaaagccataagatttaagcagtttcctgttctatgttcattttaactattatggaatgtgtctcttggagagaagggcagaagtctaatagagagatctggagaagccaccctggcatttgcagtctttgtcaatctcaatatgaacattctcatctaccagccaaactggtcagatgagttcttcctgtcctcaactcccaaatgctgtctcagaccacatccctgcacacacaccctgatatcctctgccccaaatcaaaactctacagtaggcaaaaatatcagcccccaaagaggttcacatcctaatacccagaacctgggaatctgttatcttacatggcaaaaagaacactgtgaacgtgattaaggatcttgaactggggatatgatcctggattatccgggtgggccccatgtactcataagggtccttataagagggaggcaagagggcagagaggagaaatgatgttaggctgacagcttcaaggatggagaaagaacagcaagcaaaggcatagaagtggcctctagaagctggaaaaggcaagaaacagattctcccccagagtcgacggaaggaacacagccctgcagacctatctcagacttctgacctccagaacaataaatcagtgttaactgctacgcttatggtgaattgttatagcggcaagacgaaactaacacaaacctcaaagattgctctgcttatttctgtatgtttattgacactcttcactttcactgccttccttctgtagacccattatgttttatacactgtcttctgcccgaatgagttcttgtaaaatacatgtaattgtttactatgcatgtatttttaattatgtagattggaatgtgttctagctcgtttacctttttgtcactcagcactacacttctgacatccacccaggctgctgtgtgcccttatttcatgattttcaaccattgcatggggttctggggtgtgttctctccatcatttatcaatctgctccccactgacagacactgtttgcttcttactcatcactgtcagaaatcacactgtagtagaccttctcaggtgtctccttctagatttgtgtgaattcctttgtggtctacattcctaggggcagaaatactgacatataggctgtgtgtaaacttaatttgacaaagtactgtcagattgctttcagaacagcagccccaaaacttttagctgtatgtaaaggtacctgtgaacccacattcatccaacctttggtattatccaatttttctacctttttaccaatctgatgggcactacgtattttttaccattactattttaatttatattgtttcagtactaaggagtttgagaatttcttcctatatttttcagccttttggatttttatctttataaactcgttgttcaaatcctttgcacaatcatctactcatttgtagaattctttgtatattctaggggttttttttgttcatgataatctctaataagtaagagtcctttatttttgatgtaataaaatcaaccaagtgccaggcgcagtggctcatgcctgtaatcccagtactttgggaggccgaggcgggtggatcacctcaggtcaggaattcgagaccagcctgaccaactgagaaaagccccatctctactaaaaatacaaaattagccggacatggtggtgcatgcctgtaatcccagctactctggaggctgaggtaggagaattgcttgaacctaggaggtggaggttgcagtgagctgcactccagcctgggcaacaggagcaaaactctgtctcaaaaaaaaaaaaagaaagagagaaagaaatatgaaaaataaataaaatcaaccaagtttgtgtgtgtgtgtgtgtgtgtgtgtgtgtgtgtgtgtgtgtgtgtgtgtgttctttgctgattctcaaggttttattttatttttatctttttacctttttttaaattatactttaagttttagggtacatgtgcacaacctgcaggttagttacatatgtatacatgttgttatttttttgaaatgtctccctaatggtagacatgaaatctgttctcaaatattccacgtcccccttgttccaggcacatggtcaggttgtactttcctttgaagttaggtatagccatgagactttccttgcccagtgataagtgagaagatatcacctgtcactttcaggactgttttaaagcccaagtgtaattggcccatttcactttcccctgttgacctatgtgatcacaacacactagcgagagagagatttctgttgcgggttaagccatcagattttggggtcatttgttcctcgagcatacctagcctatcctgacttttttttttttaatttattttatcccattccccactctcctaccatgagcaaccattttaatatatttattttgtgttcttagaaaatgcatcctattacatgtgcatttttaaaatttagataaatggtgttgggttgtctcactgtttcttactttattcactcagcattatgcttttaaggtccagccacactgctacaactgcatatcaaatctgttgttgttaaatgctgtgtgggtgagccacagctgtgatttccctctcttcctttccctatgaaagacacaaactttttttgaagaaatctttgcccaactctagtctacaaagtcattctgcaatattcttttctaactttgtagctttatcattcacactgacatcttaggtctccaaagtccattaccctgggagtaggtattaaggtggcattcagttttattttcccctgcacagtaaaaaaagttttcctcaaaaccatttgcttactattcagtccagttgatctgtagagccatctctatcacacatgaagtttccagacatacatgaaatggttcttgagctttccattctgttctattgatccactgcctattacagcatgcatttttatagttatggcttaatagtatattttatagattcatgtatggaagggtacatcttctgtgtttttaatccctccttgaagttgactactatgatttttcccctctatatatatttattagagaaagtttatcaagttcgttaaaaacttaacagaaatttttattgacactgaattaaattcatagataaattcaggggggattttcacttgtgtaatatcttcccatccatggccatagactttttctccatctattcaggtcttcttttaactctcttattaaagttttctccattgagattttatatattcttagactacttaaatcctaaatatttgatcatttgtattacaattgtcttaaattagattttctagttcattattgctggtgtacagacatgctattgatttttataagttaatcttatatctggcaaccttgttgaactctcttattaccacaatttttgattgcaattgatttttctaaaaggattatcatatcatctacaaacaatgagttttatttctttgcaatcctcatacatcttatttctttttctttccttaaagtttgggccagaaactccagcattatgttaaatagcaatggtggctccactcttctccctgctccaaaaaggaatgcacctgcattttctacattaggtataatatttgctgtagaattttggcttataaactagcaatctaacaaaagtttccctttattttctaagggttttaaaaaataatcataaattggtgaatacctttatcaaatgcttatcacctattcactcatttaaggacatttaagttgtttcaagtttggggtaattataagtaaatctgctatggacattcatgtatcaaatgcttgtctcaaggattgaaataatcatatgatttttattctttagcatatttaaagtagtgaattgcacgaacattgaaaaaaaacttgctcctgggataagccccatataattattatttttgtaaaacagtgttgacttcgttagttagtatttaacatacgatgtattttctatacattcacgcatgaaatgggcctgtattttcttttcttgtattcttatctgatttttcagtctgataaccaagagggctactaagcgactaataagtgagtagcatatatagcatggatatgttggacaaatggatgatgcacattctggcaggatggagcaggatggcatgaggtttcatcacagtattcagaaaagtgacatttttaaaagttatgaattgtttatttctggaattttccatgtactatcttcacactgtggttgactgtaattgcaaccaagaaaagtgaaactgtggatcaagggggaatactgtgtcaagaggtggagcctttaggggtccaccttcaaagatgggatcagtgccttagaacagggcttgagggggcaagttttcttctcccgtccgtctgccatgtaaggacacagcgtttgtccaccctggatgataaagcaacagcgtgccatcttggaagcagagagtgaatcctcgtcacacaccaaatttgccagatcttgggcttcccaacttccagatctatgagaaattaatgtctattatttctaaatcacctattctaacatattgtgttataccagcaggaatagactaagacacttatgctatctttttatagacacaccctttctctcctccctgccatctaaaaccccaggcagccactaatctgttctccatctataatttttttatcatttcataaatgttatataaaagaaataatatactatgtaacattttgactcagcataatttttcacttagcataattctcttgaggctcatccaaggtgttacaggtacaatagtttgctctttttattcctgagtagtatatcatgctataggtgttttacagcttgtttaactattcactcatttaaggacatttaggtagtttccagtttggggtgattgtgagtaaatctgctatggacattcatgtataagtttctgtgtgaacatgagtttttgcttccctggaataaatgcctaagcgtataattgctggatcatatagtaagttcatttttacttataaaataaacaggcaaagtaccttccagagcggctatatcattttacatttccaccagcaacgtaggagagatccagtttctttgcatcctcgctataatctggtgctatcactactttttatatgagccattcagataggtgtgtagtgattcctcactgtggttttaattttcattttcctaatgactaatcatgttaaacattttcttcatgttccttttttttgccatctgtatatacaggtcatttgtttttaacttttgtttcctgttaaataaatttaaacttttagactttcctctaagtgttgcttcagcctgttgtgcaaatatagacttgttctgctttcattattattcacttcaggattcctttatgatttcctttgtaaccaaagtgttgtttagtaacatgttatttagttgtcaaattcatgagatttttaaatctgtcctttggttattaatttctaagtttattgcataacagttggggaacatgctctgtgttatatgaattatttggttttaattgggctgcttttatggcctaatacatgttctatttttgtgatgattttgagtgtgctcaaaagaatgactttctctgtttgcatttggagttctatatattaaaattatttaacactaatttgtcaatatgttaataagcttgagtttattcattctatttctcagatcttcaatgtctctagttattttttgtctacttgatattgttctgcttcaatagattgattccctagtatggctgctaacttgtatccaccttaaatgataaccacaaaaacaaccataatttgcaaatacctaactgcctcatgtaaagttttaaatactatgtgccagggacttggctaagcattttgctggtgtcacatttacctcttacacttacaagtcacaaagttcctgttttacagatgaggaatccaagagtctagaagcaaattaaccatggcatgcagccagaatggcagagctggcatttaagtgcagatttgtgttctaagtccatgtttttaatgattgtattctatgcctcagtttactcatttgtagaaggaggaaatttggaggactttgaggggtttttttttaagactaagaaactcatcatcattattattgtctgggttaacatttattgaactcttcctctgtaagttctaggttctgtactaagcacagtacgtcagtgatcttatttcatcctcacagccaccctataaagtaggtgttgaaaacttagtgttacagatgaggaaacgagggcttagagtgagtactcagttaggataagaactcattggtgaggtcaccagggcctaaggtcctaatcacaatgctagactttgatcttccacactgaaccggggactttatagatgacatttcacgtagccccacaacagctgtcagagggaagaagtggtgtgccttcttaaccacatccatccaaaagttttttggttgacccctgggacttcagaaagaagtcttctgtctttcttatttgattgaaatgttcctttcaattgcttggactctgaagcccagcatcctctttttctctccccaagctgctcaacacattcctaaaggcagcatttggcccagctcatttcttcctcttcatacccctccatttaacctccccatcttcagtggaggtacacatactcaatcacattgcccatcctctcctgttgtcttccagaaaagtcttaccctaaaatggactgataagcccatacaacttatagtatattttaaatatgaagataggggcttttctcaatcatctcgaccctttcatctacctgtttttttcagagtaaagagagagaagcagtgagttattgtcatgttaagctgcactaaatggctgtatattatggttagagacctctggagaaataatgatgagatcactgcatcttttgttcttggaaaaataatgtggcaaaaagacacctctaatcctctattttaatttgtttttattgatctctttgaaaattagggaaacaacgttttctcattgcaaatgttataagaatgcatggggaggttctagttataaagaataatgaagtagaggctatgaaagagagtctcttcataaggcatggatttagcggaggacggtgggtgagaacatacctgtaaaaggaaatacacagagtaaagaaacctctcagatatcaatgactaactctcagttgtgggtttgggaataatgtgtcatcaaagaggcattccatgagctcagtaaaaactcccgcccctcccccaactatcatttcactatcatatcaatctcctttattctcttggcacttgcaggaattaccttgtttatttacttatatgattgtttacttgtattatttcccccaccttagcctgaaaaattaattgtacaaaagaaagaactttgtgtatttgttttctgccatttcctggtacctagaatcatagctggcatataataagtagtcaaatatttggacagatgaatggatggatgaatagatggatagatacgtgaaataaatgtttcctctatccccaatcttctgtgatttccaaattttctataatgaacaaatgttactgctctaaaaagaaaacattaatttagcatcacatctttctagaaacctttcctgtttcctcgggcacaagtgaatctccctcctctaatctcccaagaatattcaaacctctcattggacactgggccttgtcatcctgactctcattatttgcctacatttcttgtcttcctcactgaaatttaaggcctctgagtgttagactcataaatttccagagcagcaaagaacttaaagatcatcaggcctaacgtccccacttatagatgaaaacagtgagactcagagatgtgagctatccagacccaatggcaaaagataatccaggaaagtgctacactcttaatgccatattttctttgttcaagttgtcttaggtcactgggtaagctgtggtaggttcagcactttaactgggcacctagccctctaccctctcttctctaggccagagggcagtgccttctgcatttgcaattcatatttcctacctcagtggctgaaaggggcagaaagggctggaaagtggaggagtctcacctatactttctctctttatttggcatgtccatgcacctggcatcctaccctttatgcccaaagaattaacaaggagaagaagaaataaagcaataattctctggcaactgtcaaaaggcacacagaccatccacaagtggtttttctgataaatatgtgcaaagcctctttcagttttcccgttagagtctcagcgctcccttgaggaagaggtagctcaattctaaaagaattttagataagctatttaagacataggggaaaatacaggttaaaatataacaaattccccaaacctagcacctaagatactgaatttagggttcagcatttccatgtaggtatccatgtttccttttcatatataagtttctaagaataacatagtattgactggcagacttaaaaactacatacagttgacccttgtatataatgcaagggttagaggtgccaacctcccacccccacacagttgaaactccatgtataacttctgacctccaaaaactttcctactcttgaccgaaagccttactgataacatgaacagttggttaaaacatattttgtgttatatgtattatacattgtattcttacaataaagtaagctagagaaaaaaatattattagggaaatcataaagaggagaaaatctatttactattcattaaggggaagtggatcatcataaagctcttcattttcattgtcttcctattgactggcctgaggaagaggagaaagaagaggggtcggctttgctgtctcaagggtggcagaagtggaagaagtggaggaggtggaaggtgaggcaggagaggcaggcataccccatgtaacttcacaaaaacacattgcaatttgtctttttcacttttttatttctctcaaaaatgtttctatgtggtaccaatttttcttccacctcttgctttagtttcagtgcctgtttcacagaagtttccatgtcctaaaagaagtcaaaagtggtcttgaataattggaaccgttctgtcagataatctaatgtaaatctgttttctggcaccgctccttctatgtctttcctcatcttctggcaccagttcagaagagctcatctctaacaagttgtccgctgttaattcttatgatcttgtgaagtgtctattagctcctgaatttctccaagatctgtatcttgaaatccttcactttcaccaccttttttttttttttgccatatccacaatctctttcataatgtccttgattgcttcggtcataaattctgtgaagtcacacacaacatctgcacagttttccctagcagtaatttattgtttcaagcgtggcagttttcatggttttttgtataacgatgatgacatcttcaatggtgtaatcctttcagactttcatgggctctctttataccgttgacaatgcattccatagaatacaatgtgtaatgaaacttaaagatcctcatgacccctgaattagagacgttgtgtttgggggcaagcagaccacttcattgcctgtgatgttcaactcattgggttctagggggccagaggtattgtctaatagcaaaataaattcaaaggtagtcccttaccagcaaggtacttcctgacccagagaacgaatggaaccaattcagaatttgttgtccaggacttcttgtacaatcagaagtctagcagctggtgtttatcttttcccttcaaggcttagggcttagcagctttacagataagggtagtccttgtcataaacctgagtgcatttgcacagaatcatagatttagcacatctcttcctgtcttaaatcctggtgctcacttctctttcttataactgaatgtcttttatggcatttttcccccccagaataaggcacattcactggcattaaaaacttgttcaggtagatatcctttctcctcaattattttcttaatggcatctggggtattgtctgctgcctcttggtgggcaaaagctgcttctcctgttatcttgattttttttggtttgtttgtttgagacaaagtctctctgttgctcaggctgacctcaaactcctgtgttcaagcgatcctcctgcctcagacttccaagtagctgagattataggcacccaacattgtaccaggctcttttcttgacatttttttaaacgaaatctttttcaaaaattaacaagccaccctttgctggcattacataccccagctttagatcctttaccttccttttgttttaagttgtcatataataattgccttttactccaatgatattagagtctacagatatgcctttcttatagaaatcctgcaaccacataagagccgcattctcaatatgatataaaaaggtattttgcaaaaagtgcaaggttttcatgcatgctggtatagctgtggtgatcacttcacaaatttccttttctattctttttttatttacaatggtccttgtgctggattcatttatcttgaaatggcagaaaactgcagctgtagacctcaatctagggtacatatcaagaatttaacctttcttttgtaatgtcatgacttttctctgcttctttggagtgcttccagcatcactagtggtactttgtatgggtatcacggtgtttttcaaggtttacactattgcaccaaacatgatgaaaaatacacgagaacctcaagagatcactttttattgtggtaagtgatgtactggaaagatgaactgatcatatggagatgtcagccttgtaaatcgaaaataaaattctaagccccccagtcaactgaacagactttccttttggccaaagagatcccccaaaacctgaaaataaactagttcaggaaggcagggggcaggggcggttggacatgtctcattacaccctcttccctctggaggttagacaaaattgactagtgttaacattaaaatagagatcttaaggactgacaaaacagactctgtagcaataagacaccaaattccaacctgattctagtgtaacatcacatgacagatagtgggtcctaaaggaaatcaaagtattttgctccaaaatatacttccctgacatattttgaaatgggcctgaaaagctatctcttgcgggggaagttatattctatagagactctccttcccctacgaggtcttttcaggagattttgacatcttttagctctaataagaaacatgcacatctattctctctgaactctgctacttggaggcttcatctacatgacaggaaccttggtttccacaactcgacctctcttaccttaccttaactcaagctgactcaactcttcaggaagagcttaattctttcaaccaattgccaatcaggaaatctttgactccacctatgacctggaagccccacactctacccggctttgagatgtcccacctttccaggccaaaccaacatataccttacatatattgatttatgtctttgcctgtaacttctgtcttcctaaaatgtatacaatcaagctgtaacccaaccgcctttgggacatgttctcagaacctcctgaggctgtgtcacaggccatgattttaaccttggcaaaataaacgtctaaattaagacctgtctcatactttttggtttatagcctcaaatggcattttaaggagatactcatgacatttgaactcacagcaatagcaacaggaagtggctacaaaattaactgtagtacatactgtactactgtggcaattttgtgcagttatgatctaatactgcatctttatatttgcttacatttctctcgactgcaaatggtgccatgtacagtctgtatatgtgtaagttttgataaacttttttttttttttttgagacagagttttgctcttgtcacccaggctgaagtgcaatggcacaatctcagctcactgcaccctctgcctcctgggttcaagcgattctactgcctcagcctcctgagtagctgggattacaggcatccaccaccacacctggctaatttttgtatttttagtacagacgcagtttcaccatgttggccaggctggtcttgatctcctgaccttgcgatccagctgcctcggcctcccaaaatgctgggattacaggcgtgagccaccatgcctggccaattttaactttttaataacagattttagaatattttatggtagcaaatgataaaatagactactatctacatctttcatgacatacttaaaaattttttgatttttgatatttctgggctgcatgatgcgtctgcaagtttttcaaatcattgcacacctccaacaagatgtccaatatatgtattgaaaataacccttgtataagtggatgctttcagttcaaacctacattgtccaagggtgagttgtaattggtatcatatacatacccttcttcagcttctatcattttagttagattcattcattatgatacatggagcttaagttcattaattctactgctatccagttttccattgtatgactatatcacagttcattcattattcttttgatgaatatttattttaatttatttttagttctgtttgtaatttgagtttttttatccactaacatggtatgtctcttaacttacctaggtcttttaaaatttatttagcataaattttataattttctaggtcttacacatttttcacttgttttgatatatgttttatttttgttgctactgtaaatggtgtttttaaactttttatttgaatataaagtacagagaagtacacgcatctctgaatttccacaaacttcacccttgtataaccagacaaaaatcaagaaagatgttaccagaatcacataagcctctttatgccggtctactcactacccccatcagcaaggtaaatgctattttaatatttttgaattaaattttataattattatataaaaatgtaaatgacttgtatactgatctaatatccagagactttgatatagcatattactatttataatttgttgtaatcaaaaatttgatttatattgtaatcttttttcctctctagacaatcatgccacatgtgactagtataacattgttttgcttcctttccagtaattattcattttactcccctttaaaaaaattctctgcccttactggctgtctttaacaccaagtgaaatagatgtagtgttggtgcatcccttcctcactttcccttggttttcaaggcaatgttttcatatttatcatttattatgatgcttattgactgaagatgtccctcatcagaataagaaagttcttttctattcctagatttataaggggtatttttagtttaatgattttatgcacttagcaaataattttatgcacttaggcagctataatttttctattttgtttgattaatgtggtaattacattaatgtattttccaatgtcagacaaccctcatagtctctcaatgaacccaaaattgccttcatctatttactatttttacttcttaagtttaaacttttaattgataaatacaagcaggtcataaatcataaaaaagcagcaaggtgaatttccacaatactgacatctcctatgtaacagatcgataacaaaatattaccagccctcagaagcccaccccatcacgcctttccccgtcactaacccccacaagggtagccagtatcctaattgataacttcattgtttgtatttgcctatttttgaacttttatctagaataaatcataagcatctgctcttttgtgtcatttgttcaaccttaggtttgggagagtccaccacagtgttttaagtaacattacttcatccattcccattgctgtataaaagcgcattacatgaatatcccacatttattcatttattctattgttgagaaacatttttgtttcaagttaataaacattaggaatagtgctatcatgaacgctacacatattttgctgaagatatatatgcatttctgtgagaaatatacctagaagtggaattactggggtgtgggtagtatatatttactttctatatacaccaaggatctacaagctacaacccttctcttccgcctgccaacaatttttgttgataaagttttattgaaacacagccacacctatttgtttatgtatgtctatgctgttttagcacctcagtggcagtgttgaatagttgtgatagaaacagtacaacctgcaaagcttaaaatatttattatctggtttttacatagaaagtttgctgttccctgttgtatactgtcaaacagtttttaaaagtggttataccaatttatacccccacttctctagctttgccatgatatgttttaatatgcattcttgaattttgttcttatgtataagtgacattaagctaatatgccttcattttttttgtcctggtgtggttttgatatcaaaatatcctagacttacaaaatgaattaggaaattttcctatatttttcattctctgaaagagtatgcaaaaagaaagaaagaaattatattttctttgaatgcttggtcaaatttgcttgtaaaacaatttgggcttagcattttgagaagattttcaattattgattcattttttaaaattatattcattttgtttacttcttgagtcagttttgaaagttacatttttcaaggatatacctttttagtctcacttattgacaaaaagttattatattcattcatcattaagtattttaataggaatcatttcatatataaaaagagcacttacaaagtatatgtagtgaaaaataaaattcacttctgtctatgaaacatcttccttaagaaacagaacaatatcaatacatttgaaattcacttgtgcccctccctacagtatccacttccaattgcttttggagggataggcactctcctagaaaaaattacatatgtatacaaacacacacacacacacacacacacacacacacacacacacacatctcaaatgagatattcaaatattattggaatatattttgcacgtttctgaaatatatataaaaggaagaatatcacatatattcttctttgccttgcagttttcactaaaacttcacgtttttgacaacagttatccatattgggtaactcatttttgtgctggcttactcatttttactgtcttacaagatcagactatatgaatagatataaactattaatacaatttactcatcaattctccagacataaacatttatgttggtgccagattttttagctattagtgagcaaggctgctctgaacattcatgtatttatctcctgagagtacatgtgcaagagtttctctagtctaggctacatatctgtgagtaaatcactggatgttatgttatacacatcttcaatttaatagatgattgcaaactgcttatccaagtggttgtagcaatttgcattctcatgaggagtatttaaatatttgctgttctaattaattgcaaatacttggtgtttcaggctatttggttattaccaatctgtaagtttatttcttggacttttaatattagctgtatgttaaggtatcctcttttattcctaacaatttttgtttgtgccaactttttttctggagagaaaaaaggagtttggtgtgtttttttatgccttttcaaagagttttggctttgttgatacactctgttttagcttttcttatttcattgatgtattctctaatattagttatatcctctttccattacccttaggtttaatctattgttcttttttaccgtaatatgattgcttaaatcattaaatatttggatattcttcattactgtaagcatgttaaagctaggaatttccctgaaattgtgagtttagccaaatcccaagagttttatttgtattatttttatgatcattcaattctaaatagcttatctgttgcctttaagacattttcatgacataactattttgtaggagtgctttcaaacttccaaatgtataaactttaataaaagtaaaatttttgcttttctttctaacttgatctcattgtgattagagaatatagtttgtgtgatgctgactcaaaatttttgagacttgctttattgattgatttttgatttttgtaattgttttatgtattcctaagctaaatgtatattctctaatctcggagtgcagcattttatacttgtcaactggattgttcttattaattgtgtcatataaatcttttctttatttactagttatttgtctactttgtctgtcaattacagagatgtatctggtatctccaagcattcttcttatgccttctgctcataccagtctccctgcttttcttaaaacaggccaagaactctgccccttcagagccagtaaacttactgattctaccgtttggaatgattttctcaaatctataacctgattgactccctcacttcattcaggtcaccttatgagggaatcctaccttcatcacaatctaaacaatagctcccttgctccttaattttctgtccctttaccctcatttgttttttccttttcagcccttaccaacatcaggcatattaaatatttttttcattatcttttccatccagaatataagcttcaggggaattgtgatttattcattataatttcctcagtacctagaaggatgcctggaataaaatagaggattttatttttaaatgtttctaataataaaatgttattggtaatcctaattatgtgtgggcccaaactgttgcacaacaacttgtgtaatcccatctattcatttattgttcaattaattcttgttcagcaaacatttgttcaatgaatgaatgaataaatgaatgttaaaaaaaaaccatctcactgacagatttgcaatttcctctttgcaactgtctcaaatttggctttacatattttgagatcaagttattatgtgcatacaggtttagaattgttggaactttcagaataaacaaacattttataactgaaaattaaaatcttattttaataaaataatttatcattttgctttcagtctaatttatctgatattaataatgtttcatcaacttttttcctattaccagtttcctgctatatttttcccacctgtgacttccagcctatttgcattattacattttatgtatgtgtcttttaaaattgtataatttggattttgttttctaatcaaatgtaacattttcacatttaaattagggagtttagtttaagtacattttttgagaatactgataagttgaaaattctttctcacatcttacgttgtcttgctttttaaaatgccctttccttcctttccagcctttctttgaatttactgagttttaattatgttttattataaatctagcctttggtcctccaaatattttactaggctctgcaggtcagtagaaataagttatgcatacacatctgtgaaatttatgcatgcaaatagcctccattcgataggtccgatattctgggagctgggcagagcatacctacgatatactatttcatggaattcaaatcccaatgaccccctataaaaaaggcactttcaagtttctactgaacttgctcttccctttctttcccctcttttaaccccaaccaaacaagttagccattaagcctactgctctgtgtatcaagtgattcttaagttacgtaaatatgcctggtagcattcacgacttcattcttttaattattttatttacttagttttattttattggacagcctccaccaaccctctggaccagaataagttcagagctactcctgtctttattattattattgttattttgagatggagtcccgctctgtctcccaggctggagtgcagcggcgtgatgtcagcttactgcaatctctgcctcccaggttcaagcaattctcctgcctcagcttcctgagtagctgggattacaggcgcccaccaccatgcctgggtaatttttgtatttttagtagagaccaggtttcatcatgttggtcaggctggttttgaattccttatttcaggtgatccacctgccttggcctcccaaagtgctgggattacaggtgtgagccaccaagcctggcctcctgtctctactattttaaatagccaggtgacaaattgaactcttcaattatttgttgaaatgacagaattttagggtcatagaaggagggtgagtttcatatgagcaacaggaactactggcttaaatgtgaaaattaatgcatctctgcaaatcaagctgtggctatctctctgcttggtctccaaaggacatatggtttacaatcctctgtgacactgaaaagagaaaagaagcaagactatatttgccatttgactgcttttcattggaattggattaaagcatatttcactttgttcattgtcctttttaaagcattcagctccacgaaaggttgagccagagcaagtagttgaaaagattttctatgcccctttcctcccgcgttgtatgactggtggcaataaagtcactttcaggcagaaagatgcaaagccattaactcagggttacatacatcccaaaccaggctcaatgggaagaacacatttgactgtctccttctgtttatttagccatcttcttaacatttcttttttggtgtatgttttatgtacccaaattgtatatgtaatgtacatataatacattactctagtaatgtatacatacatttatcaataagtatgtgtacatatggggaatatgtgctcagaaatgttttactaatttgatttgtgatttaaaaatgagtacactggtgtgtgtgacagatttggaagcctggtttctcatccacacacttcaataagcatagccctatagaccctctcaggtgtattatcccagttcatatcttgggccttctttattgacttaattccttaaggtgatactgatgctttccagttgaatctatttccagagtactttcctcctatcttctcttttttctttaatccctttgtccaaggcccagattactgccacttaaattcagttgtatctcttacctttttctccattccaggttgtgaacaatgttgcacaataatttgtgtaatccctgaatatatctttcctgacttgagaaaaaaatgagaatatctttcagtatcagggctccttggaggtcagggacattgaataatggatggtattattcccattatttatgtgaaaaaaaacactgagattaggtgatttttgtgtaaggttacagaatcaatccgtacgtttttaacctcaccttgagattctgagtcttgtacttttccctgctgggatcctcagtgagtctatgttttctcaacctctgaccagaggctatgcctgtgccctgtccttgtttttcatatggtaaggaaaatgtcctcctggatcctaggatctgaccacatcttattaatagagttcaaggcagtagaaagagcaaggtctttgaaagtagacagaagtgcattcaaatctcagctcccaggtccacataagttgtgagacctcattatgcaggagtaaaaacacgccccaaatcttagtggcttgaaaaccaccaatatttgtttcccactcactttatatatccatgggcaggttagaaggcccaagatatgaattgggataatatacctgagaggacctatagggctatgcttattgaatcgtgtggatgagaaatcaggcttccaaatctgtcacacaaaccagtgtactcatttttaaatcacaaattctaattatatgtggacccaagctgatgaagcagatgccagaggaggagcacatggtgacccataactagctctttaagcttccatggagatgagacatatgtcacttacactcacacggatgcacccaacccaagaagggagaagccttcttggccgagaagggaaagcccatcgtgtgctcaggaggagaaccaaaaacattggagatacaccactcataattatcacgccaatgtatttagcatctctgagccccagtcttctatgtaaaaacaggacagtgataaggatagaaatataataaatcagaactaatgtcttaatacatgaaatgtacagcacaatgcttggccagcggttgagtcttaacaaatattagttcaatcctgtctgcattttgttcctttctctctagacctgagaatagagggaattggtaggaaaatgccagcgggccggtttctaattccaccaagaagacaaggaaaatgggttgcaacagcagccagaggacagaaggccagggtagccggtcaggtcccagggatcaggtagaatttcattactcacaggactttttttttttttttcagcacaaaataaccttctagaaaacccagctgaggagaaagttcacaaaggggtcacataggtagcccaagctcttcgaggtcaatgcatggtgtgcctcttgatgcagcctggcactttcattaacgtatttaatcatgcttttatctttaatcatcaaatggcttaatagcatgcattgtattcccaggcctgaaataacaatggttatgtggctctgtgataaatgtttttaataaaatcagtaattaccctttttgtgtgtgtgtgtgtgtgtgtgtattatattaacatctttccatttccttaattttggcttttagatatgcaaaaaaaaaaagactaaggtagaatactcaaaatactgttttatgtttggttttgtttctaggagcgcctgctgaatagcaggaaaggtgaattctaagctgtggattttaatgcaaacttcatctaagaacagttggggttgggagagagccctggcttcagggccaaccaaaggtggggtctgaatcccagctgtatgagagaaggctactcataggaactctccaagctgaatttccaaatctgtaaaatggtagagcactattctttataaagttgtggtggagaatataaagatgcttaaaagtaattacatttaacaaaaaatagaatagcccttactatgtaccagaagctattctaagtgacttataaatattaactcatttggtcctcaacgcaaccttaccaagacaggtattttgagatgatagataaataaaaagagaggttaagtaactttcccatcgtgccatagctagtaagtagtagagctgaaattagaacccagacaatctgcctagagaagtacattcttgatttcatactctaaacaggtgagctattattactgttgttattggtccaataaacatatttttacttaatagacctggcttttgtactggaaactctggtcattgtacatttaatgatggctgtttatccttacacttaatttatatttaatttataaatataaataatataatttataaatataaataatataatttataaatataatttatatttaatttatagatataaattatataatttatatttaatttatagatataaattatataatttatatttaatttatagatataaattatataatttatatttaatttatagatataaatcatataatttatatttaatttatagatataaattatataatttatatttaatttatagatataaattatataatttatatttaatttatagatataaattatataatttatatttaatttatagatataaattatataatttatatttaatttatagatataaattatataatttatatttaatttatagatataaattatataatttatatttaatttatagatataaattatataatttatatttaatttatagatataaattatataatttatatttaatttatagatataaattatataatttatatttaatttatagatataaattatataatttatatttaatttatagatataaattatataatttatatttaatttatagatataaattatataatttatatttaatttatagatataaattatataatttatatttaatttatagatatataaattaatatatatcaatttatatttctattcaaactgtttgtgttgtaaggtgttccttattcatttatcaatgcccgatatagaattggcctttatttatactcactgtatgtcattctgcagaatagctcaggattcttttaagtaagtctcatcctctctacttatattgttgaaggcaaatcactctgaaccttagttcatctctctgtaaaattaggctacaggttgtacctgctgtttcagactgatgtgtcttatttatttagcaaatatgtattgagcatccacttagagtaccatacccattcctggcgggaagtgtcttggtaattttaatcaatcctgacataccacccacagggacctctgatcatatagataggaacagtcttggataaagaaggaacctgggctgtgaagtcagaaattgagctcctccacttgtagaaggacatgtcacctcacctgaatcctatctgtaaaatgggttgacctaagagaacaagaatctgagaaggaaaaatacatggcatagtgctgggcacacatcaaggacaaagagggagactgtctagtctacttctaatttggttttatgaagcccaagagacaaggacacatggtttgctgagtccaaaagcaccatcatgtgcataagttcagggccccgttgtgtttccaatacctaaccccccttgaaaatgccccaggaagaattggcttgtatgaccacagcagtcccagcaaatttgcaggatggtgcagtcctacagcccttccctacctaggaacaaaagtttgtagcctatattcttcttgaataataggaattatttattttgaaatgtattcctggaactttgcttgggttatagttttaacttccataggcatgaattcacatgctataacgtgtgtgttttttaaaaaaggagccccaatacagacctgctcacagcaagatgaagggtatttactgggtcatacaagatgtgctatggtgtccagataagagctcagaccccaagaggaaagttatttttccagccctaaaggatagagtaaaacaacctttcccattatcttgctaggcaagaaaccaagacaaagcggtagaactaaggggtggcaggcaagaatatacatacaaattacacagactggaagtaacagaaccgtggagtcctgcaagcaggtggcaaagccatttctctctattcatcgtgcagaataaattaggggaaagccacatttcccagccagagaagcaataaaaatttaaaatgtaaaataaccttgagcaaaagcattagcaaaggccttgcctgttgctatggtttgaatggcccctccaaaactcatgttgaaacttaatccccaatgtggcaatcactgagaggcgggcctttaagaagtgaatgaatcatgacggctctgccctgatgaatagattaatccattcatggattgatggattaaggggttatcatgggaagggaactgatgactttgtaaaaagagagagacctgaggtagcacattgcatattagtacagttagcacatggccacatgatgctccatgctgccttgggacttctaaaggagtcctcaccaataagaaggttctcaccagatgtaccctctgaacctcagacttcccagtctctggaactgtgagaaatcaattttgtttctttataaatcacccagtttcaggtattctgttataagcaacagaaagcagactaattaacctgttctgcaaataataataaactcttgatacaacagacttatcctagccaagactagtgtgaggcagtaacagtgggaagtctaggggaatggagaccaggaacactcaaggggaagagaaactcgaaggaagccaggacaggacttttgtcttatttggagttgattgaaggctttcaccaaatgcactgaatatagtactcatcgtttgtggacttttttttttttcatgactatggtcaagaagttgagggtaaaatgtattccttttcagtcaataatttgaatctgatgctattacttctggtgtggttccttaactaggagctcgataaagatcacgaaacacatgtatctggagatcaggattagatatgcccaacttaactcttactctaatgattttggtaccaaatgagtaataactggtaaacaccctattttttttttttagataccaatgtcttggcaaggtctatttccttctgaaagggctacaccctgggcctttgcagactcgcctcctgctttctaaatctagaccaagttcctaccaatgacagcaaagcactccattctatagcaacctcttttcttaacttagaacgtatagtgtgtacattatcattcaaagtttgtacatcatgaatgaacaaggaacaacattccaaaggcaagaagagtaaataggaaaggttctattcctccctctccctgagctgagccatctgtcttgtttctctccctggaggcaactactcatagcaattttggatgcaaccttctaaagatattctttacttaaacatatataagtaaatgtttaaattatcataccaaatattcatgaaatttaatacacaatttatataaatttctatgaattttaatacatatatagatttcatgtaaccaccaccactatcaggatacagcatggtttcatcattccaaaaaacttccttgtactatccttccatagtcacagtgtccctaaaacttcccacacaactcctaacccctggcaaccaccgaactcttttctgttactatggttttatctttttgagaacatcacgtaagtggaatcacacaatatgtaggcttttgagtgtctccttttctcagtataatgcctttgagattcatccagttgtgtgtattaatagcttgtcccattttaattgctgagtaatattccaacatgaggatgtaccacatctcctttatctattaacttgttgaaggccacatcttcttggtgattatgaatagatctgctataaatatttgcgtatttattttggtgtgaacatactttcatttatctaggataaataaccagtatttgggttgctgggtctaacaagtagtacgtgtttaatttattaagaaattaactaaatgttttcaagctgactgcatacactgttctgcattttataaaaatcagtgatgcatcctaccaatcattttggatgtgtcagtttagttagatctacctcatttaaaaaatcaggctgcaatgttttaatgttgtcattgtgatgttttttgttttttgttgttttgttttgttttttgagacagagtttcgctcttgttgcccagactggagtgcaatggcatgatcttggctcaccacaacctccgcctcctgggttcaagggattctcctgcctcagccttttgagtagctgagattacaggcatccaccaccacacccagctcatttttgtatttttagtggagacagggtttcaccatgttggccaggctggtctcgaactcctgacctcaggtgatccacccacctcagcctcccaaagtactgggattacaggcgtgagctaccatacccgacctaatgttgttattgtgtttttcatatgttctctattgatggggtgtgtgtgtgtgtgtgtgtgtgtgtgtgtgtgtgtgttttccaggtgcaaaatcactgggccaattacccccctagcttccttgaagaagccattgtttttcttaattttgttaatttctggatacccaattttctttcttctacttttttcagtttattctgttgaaaaaattctaatttattgagttaacttcttaattcacacagattaacaaacatgagagagtagacattaagtccagaagttcactgttttagttgtatcccatcaggtctgatatgtattattttatacctatttgtattattttgtgttcttattttctagatattttgcaattttaatattggtttcctcttttacttgaaacttgcatgagataattttttgttattaatattctattacatttccaggtgctgggaaatatatatgctacacataaagtgtaaagaacgatcatcagaagaacactcttcaccagcagtttgagaaacaacattatccatatctctgaattccactttgctgcactcttctaattcatacatttctttaccccaagaaacacccatttttctgaatttggggttagtcattcaactgcttatatacataagcagtgataaacctccaatgaaaaatgaacgtttaagccttgatgtcaatggaatcatagtgaatgcattccgctctaatattcatttttctctgaacagtatgtgtggaattcatccattttgatactggtggctatagtttgctcactttcactgctgtgtagtagccccattgagcgtaaatatgacaatttacttctcattttttctatgatggtccatttagattgttatcaatttttagcttgtacaaacaaatttgctaggaatgttcttgggcataatccatgataaacatgggtttatttaggttagctcctccaggatggaatggctaaaatatacgatatattcatcttttgctttataataaaatgccaatgtttgcctgaagtggcttgaccaattgatcctgcatgtatcggcaccctcctgctccccatccttgctcatgtttgataatgtcacacttttaaacatttcttacatatgggatatgaagtcatatcacctagtacttttaatatctgtttctaagattttaatacaatttctcagttctttgtgatcatccaactttataaaatgcattttctttgttcacgcttttcttttcttttcaaatgcctttttaaaattgattcactgagattcatgatttactctagatacttatttgttgctggctttgtatgttgcaaatattttctgccagtgtgtggtttgtcttttcaattgatttgggggtgccttttgaagaagagaaattcaacgttttaacacatttgattaacattactatttgtataatctttaagaagactctacctcacagtcaaaaagtattctgtctatatttttctcttaatatgaaggtttaccttttataaataagacatttattcatcaaaaattgattctgtgcatagtgagtgataggatcccagcaatttttccaagtggaaaatcaattattctatcgctatgtaggattgttgtcataacaatttacaaaaccgttccacatatgtataggcctatttctgacttttcatcctgctctacttgtaaatccctgtactaacttcacattctcttaatttctgtaacttatagtatgacctcattaccgggagggcagcaatcttcatgattttctcttttggatatcctcttctgtaaaaatcagagaactctcttgtcaagttccactgggggttttatcttaattgccatcggatctatagattagcttgagaataatcaacatcttaaacacactgggtatttttatccaataatctatctctctatttaggtcacgtttaaaacttttcaatgcaattttataattttttttcataagaaccatggacaagtttgggcatggtggctcatgcctgtaatcccagcactctgggaggccgaggcaggcggatcacaaggtcaggagtttgagaccagcctggccaacatggtgaaaccccatctctactaaaattacaaaaattagtcaggtgtggtggcatgtgcccgtaatcccagttactcgggaggctgaggcaggagaattgcttgaactcaggagggtgtggttgcagtgagctgagactgggccactacactccagcctgagtgacagagcaagactccattaaaaacaaaaaacaaaaaacatggacgagtgttgttcagccctaggaagttatattttgctattatacttattatcatttttaatactttttctgtttgcagctggggtacagaaatgcaatgactttcttgaataagctttttattgaagtacaatagatcaaaaatgtgcacaagtcataagtgtacagttttttaaattttcaaacagcgtggtccatgtaaccagcacccagatcaagaatgaacacatctttgccatcccattactgggtatatacccaaaggactataaatcatgctgctataaagacacatgcacacgtatgtttattgcggcattattcacaatagcaaagacttggaaccaacccaaatgtccaacaatgatagactggattaagaaaatgtggcacatatacaccatggaatactatgcagccataaaaaatgatgagttcatgtcctttgtagggacatggatgaaattggaaatcatcattctcagtaaactatcacaagaacaaaaaaccaaacaccgcatattctcactcataggtgggaattgaacaatgagatcacatggacacaggagggggaatatcacactctggggactgttgtggggtggggggaggggggagggatagcattgggagatacacctaaggctagatgacgagttagtgggtgcagcacaccagcatggcacatgtatacatatgtaactaacctgcacagtgtgcacatgtaccctaaaacttaaagtataataaaaaaataaattaaaaaaaaaaagaatgaacacatcaccatgatatgagaaccatcttaaccagtgacttcccctcataaagataaccactatgttcatcccttttaccacatattagctgtccatcttttggacacttatggaatgacagagaatgtattcatttatgactagcttttcccccttgtttttgtgagatacatcatgttgaatatggctacagcttgttcattctctttgctgtataggtttatattacatgactagactataacttatgcacattaatgttggtagatttttaaacagtttacatttgggggatatggctagtatgaacattcatgggctcatctttttacatacttaggtgttcatgtctgctcatttgtacttagaagtagaattaatggttaagcatatacttagtttttgtagatcctgccatacgcttctggttttccaaagtggttgtaccaagattcacttgtagtagataagaattccaatacgaaatacagcctgtaatttgacattttaatatttcttattatagaaacattggcaaattctcatatgaattctaagattttatctacataataagctagcattctgagaatgaattcgccttagtcatcatgtttttctttgcataaacctggctcttgcaatttttttgctaataaattgctaactaactttggtttctgaatgtgcataagaaaataaagctataatttcctttctcatgctgtccttatctacttttggcacaaagtttatgtttactaagtataattaatcagagaaagtttcatttcttttttgtaagattttatgtaagattagaatttccttttcctcaaatgtttggtaaaacttgcctattaaatcatttgtacctgatgttttcattttggggagattgttgacagattataaagtaatcctttaaagattacaggactgctcagatttttttttcactaagttttaatatttttctacaattcactcatttcaggttaattctttagggtaattagcatagagattataatattatcttttacatcactgatgcatttataatcgtattttttcacatataatatggcttatttgtaccttctctctttttttcattttaccttggcagaggtttatcaattattttagcttttattatggaattaactttgactttgccaatctttctattgtacatatgcattccatttaattaatttctgtttctaccttaattatttcttcctttctgtgttctttgtttattctaactttgaagtgtgatgcatagtccattaattttcaactttacatctttgctaacataaacatttatggcttaaacttctccctaaatactgctttaactgcatttcacacattttgacatataatagtttcattatcattaagttctacatattttccaattttcactgtgatttctcctttgactccagagtaatttaggagagatttaagtccacacacagattttaaaataaagttactttttattgattttatgttaattataaacaaggaatgtagtctgtgtgataacagattgagttgaggattcattcctaacaaatggtcaatttttatgaattctcatgtatgcttggaatgaatatgtggtttctagtcattgaacactttgaaattgttcaaatcgtcatcctgatagtatatattctcctgattaaaatgttacttactgagagagaatatattaatattgcttataattataatgtatttgtcacattctccttgatgttctaacatttgctttgaatttttaaaggcatgttaatactgtcatactcagtttagaggtggttatatcttcaggatgaatttgacttttgtcggtatattaatggttatatttatctctggtaatgcaaactgtcattttaatagtgtttcctagtgtcccttttcctctaatttatctgtaacctttccatgattttatgttttaagttgtgactcctataaacagcataaaactggatttttttttaaatctaggagacaactttggtctcttctcagataattttgtatctttgttttagatatatttctaccaccctgttttgtgttttctattagattgctgtcaagattttactgtctggatttctttcatggtcacagttaacagaatttaggtattcctttttgtgttagtgatagtattttatttttcttgaaagttatccatttcacataaatttttaaatgcattagaatatggtaatcaatagtattctcctattttaaattgtgccatatctgtagactaactataattccccttaattctttgtgtgtgcgcacgtgcgtgagtatgtgtattgtctttcttccttttggctttgttgatcttctgggattttttctgttccattaatttttgttcttatgttaataatttccattattttactgtctttgaatctataaaatagtttctttttctggtttattagcttgaaaaactagcttaataattttcagccttttaaaaaataaggattaaagaaaataaatcttgctttcactataccctgtgttttaatgtacagtattttatttattttccctgaaattttattttgaggtaactgtagatgtacatgctgttgtgagaaataatatataaagctctcatgtaccctttatccagtttcccccattttaacatcttccaaaactatggtgcaatgtcctgatcgagttcttcatgtttatacagtcaagacacagaacatctccagcaccagaaggctccctcatgctgcccttcatagccacattcacttctttttgttccgcaactccttcttaacattggcagccactaatctgttctccagtttttttaaattattgtttcaagaatgttatataaatagaatcatacagcatgaaaccttttgggattagagttttccacttagcctaattctctgaagattcacccaggtttttgtatgtattcctttgtattgctgagtagtaatcaatggtgtgcaggtaccaatttgtttaactattcacccaagggacatctgtcttgtttctagttttgaggttgttacgtatgaaggtgcaatgaacactcacatgcaagcttctgcataaacactgcttacacaaaatatatagtagctttatttagagtaggcaagtagattttaatttattatgatgtctttgttgacccaggagtggttgtttggaattaaaaaattactaatctacatttaatagggctatatttttgttgttgacttatttcttctgtctttccagatagacagacagatatagatattgatgtgtgtttgtgtgtattcatgttttgaattaattgagtccttatttgatcaattttatgcatccatgtgtacttgggaagaatatgtattctgacgtccaaacatagaattctttaattttttaaagattttattaattttgttaaatcttttaactcctcattgtggtttatatgcttggtttacaaattactgagatgtgtaaaatctcccactatgatgtgtcatttgaaaatttttcctcctagtataatcaagttttatttcatatgttttaacctgctttatttggtacatacaaatttagaattattgtacctgactagtgaatttatcctttcatcacatagcttcattttttcataataattttttttgccttaagctctgttttgtctgatattattataactacaccaactctctttttgttagttttgcccagagtatcttattctattcaaaaatattgtatgaaacttctcaacttttttacttcctgtctttttgaatacttatattggcgatgtgtctcttaaggaacatgcagcttaaaaaatgaaataaaactttctattgtaaaatatagtataactatagaaaacagaataggacaaatatagagcttaatgaatatttatgaagcaaatagtctcgacatcagcactcaagtcaacaaatacaatttgctggccatcatggaatccccgtcccagtaacatacccttttcggcccctcaaagtaaccagtatcatgacttttataataacccctttcttcttttatttatagttttgtcttccaaatacacatccccaggcaccacggcttagatttttctgttttggttgtatatttttaaagacaatgccttcagtctcttctagtctatcagtcctgtctccagcctactactctccaattttcccagtgcaatttatttgttaaaatacagggtcattgcatctacatgcttactctaacttcatcttgtattttctctgccccagctctgagatgaactatttatctaaggatgcctagttccttttatgggagatggtatttagaaaccaagatctgcatgctagttgtgttcattgttactaggatatcattctttccagggcttgtcagcagacagagcttggaaagacatatatatatatatatatatgtatgtatgggtgtgtgtgtagatagatagatagatagatagatagatagatagatagatagatagtaactcatgcctaaacacaaacccatatctatttatctatctacctatcatctatctatccgtccacccaccaacctacatacatatgtgactatctgtctgtctgtctatctatctatcatctacctatctaatccatccatccatccatccacccacccacctacctatatacatacatacatatctctctctatgtgtatctacctatctaacctacctagtgacctacctacctacctacctactcacctgtctatccattctgatatttctgattccagttcaacaaatttcattcatgctttaccaagattttggccatttcatatgagttcaagataaaataccccttaagctcatataaaaacttacgatttaaatttaggactacaagttctcctatcttacaaatgtattgcctttcttcttcaccaagaatcctggttctcacggagataagggtaaaatagaaattagaatgtcatgctttctatgttgtacacctaacagtctcagaatgacagaagtaatttcaatactacgtccatttatttgattattaaaacaataaattgatttatagatccttttccaatattcctgcatctttaataggtgtgctgaatttatgttgtcagagcatatagccattcaatactgtacttttttccatagaatatttatttaatgttcaccagtagcctttatgctgatatctctctaatcatgttggttgactgaaactcattgagtagattattcaggaagaacccattagaacaatattatctgatttcctgcatgttgatagcaatttgcagtttttaatgcttgaaagtcagtcttgctgtatataaagtgcttggtttacatttttttacttgagtataataaatatatcactttattttattctggcacaaagcattgctgccaaaagactgataacattctggttttctttcctttttgtatgacttagtcgtttttcctggaagcatgaaagaattattttcttttgaggtccaaaaattttactaaaacatggctcagtgttggcaatccaggttggtgttctcaagtaggtatgaccgccctttcaataagtaattattgaagttatttcagaaaaagaaatagtacaacaagaactttttcttaaattttactttttgatatttgtgcctttgctttgggtttcttctttgggaattccagtataatgattttcttagcctgtcttgtaactttttccttttctcttggatctagttgcctcttgcttttgtaaaagtttccttctttaacttagttttctccaggcactagtggttgtgtgaatttattcgtgtgtgacttctaccttagtctccatttcttagatatattttcttaaatttataatttatttcctgagtcctatgactacattctgagttttctaattctgatttttgttgttgtgtctcatatcattttcttaatgtctttaacgctttctgaaatagttctcatctgactcgtaggcacatttatttggcaaactttgattttctggaggggtgttattctcctttttctttgagatggagtctcactcactctattgctcaggctggagagcagtggtgcgagttcagcttactgcaacctccgcctcccaggttcaagcaattctcctgcctcagcctcctgagtagctgggactataggtgtgtgccaccacacccagctaagtttttctactttttgtagagatggggtttcaccatgttggtcagtctggtctcaaaccctgacctcaaattatctgcccaccttggcctcccgaagtgctggtattacaggtatgagccaccatgcccggctttctttttcttgacactaactttgcatgtgtttttatttcgattatcttctgtcttcccatttatatgaaattggtttccctgagcatttagaagagaatatagtccaaaatttcatttctaaactcacagagctctcttttctcctgtatatggtatgcacgaatatggtggctcattttctgatactcgcagatcttcaatttcttgtcactgttgtctctgtgctactcaatttagatccttaatttcattgtttattcctggaagggaattttgactggttccttctgagagtccacagggcctagactactccagacacataaggtcttactgttgaccccttgtttttatcctctactgaaaattgcaagatccttcacagttttagctacaattctcaaatttgatgtttgagctttccaggaagtacctgttagttatgtgtgactctgaagcccatacgatgccttattactttcctctccttctccctgagtagtcctgacaccatgcagatcttgtagctgtcagtctcataataatttgatcgtctttccttgacaagtgatttagttttgccttgaatgaacacagaattcatttttcttttaaagtccagaaattttatttgaatgtctcattgttggacaacctgattgtcaatagtttgaccctctctactcattatttgtaatttatagggataacttgcctcctaggtgttttgtaaatattgttcatggggttttgttttgctgtttcagtttgtttgtgtgagggaatttggaaaatttaaaaactaagtcaccagtgtcattttccagccaattgcattttcttttctttcaacaacttaatctgacaatgtctcctttgattggtaagtttagtacaatgacgtagacatatattgtagttattgataagtttgatattagtttttcaacttattctatatttttacttcatgtttaaatttctaaacattttttaccctctctttaattccattttttccctctcctgtttcagaaattaatatatatatatctgcatcttttagttaaaattgtagccaggcacagtgacatgtgcctacagttctagctattcaggaggttgaggcaggaggatcacttgagctcaggagttgaaggctgtagtgtgctatgttcacacctgtgaatagtcactgcattctaacctgggcaaaatagggagaccctatctctaaaaaaaaaattgcacacatctcagttgaagtctaagtagtatcaatacatcacttccacagcaatccaaagatcttggaatacattaaatagaaactccctctcagtttacatgttatggttgaccaatagtttagttgtatcatgttttctacacacacatataccaacttgaactttactattttttatatagtcagtgtttatttagatttcccattctgcttaccaatttccttgctcaccactgatttttgcatagtaggcttttcttcctttctggggaaagagattgattttccctttcctcagctaaaatgctttgactttcctatgagattttattggcaatttactcttaggttttgtttattacaatacctttctcttacccatactatcaaccatgtatgcaatttaaggtttgtttctttccttctctcttcattttgcggatttttcgctgttttctggctttcattgctgctgttgagaaacctgctttgagttagtcattccatggcaagtgatctgtatacattttcagcctctttgaagacctttctgttgctatgaaatttcctgtaataaatctaagtgtcttttgattctttcttatttatcccgcttaggataaactggctttttgaaactgagaattggtgtctgtcatcagttctagaaagtacttggtcatctcactttgaatattgtcccttccttcagtttctacttacagaatacatatgtgagactctcatcccactaacatgtttctttattcccttcatgttttccttttttttctctctctctcttcttggctacaatgagggtattaagttctagcctccaaccaattcattaattctcttctcctgtatgtctcatttccttcataatatgtctgctgagtttgtcatttcctatctaaattatatttgattcttttaaaaatatgcctcctcaacatttggtgttctcaatccattatcccattattcatgcattttgagacagggttttgctctgttccctggagtgcagtggtaagattactgatcaccgcagcctgtacctcccgggcccaagctattcttccacctcagcctcccgctgggactatatgagcacaccaccacagctggctaattttttaatttttatttttgtagagaggaggtctccctatgttgcccaggctggtctccagcctgaattcaagtgatcttcctgcctcagcctcccgaagtgctaggattacaggtgtaagtcattgttcccggctcatcttttatttctgtaaatgttttaaatattttttccatatttggtcattcactgagggtatatgatttcaagtacataagctttattcagggtggagcctttgttctaactccccttaataaaactgaaactcaaggttctttttattgagaaattttcctagggcaggcagtgctgtatattcacttacaactctattctcagctctcttttcacttttgtcccctggatatttcccttaatttcacaagcatagtcattcacttaaaaacacacactcgtcctctcccaacatatacgtaattgttacagaaggatttttttaggatacacggttttcaatattggccatagtgaaagtaagttgggtaatttccacatttccatttccctaattatctcttcaaatttctctgattacctcttcgagtctctataatatgaagagttgtgatttttatgaatgtagaagctacagcaaaaagactaggcagagaacacggaatctatctgttgttggctagagtttatcttctaataatttaacaataaacattaatggggaccatattcctgaaattgtgtgtttatattgtccatctcctgtacttatatgtgaatggcaattttgctggttgcagattttcagggtcaaactttatttctctgaaatatttacagatattattctactgtcatttagcatttaatgttactatggagagtgtttttttttttaattttgtaggccattgatatgtttgcttgtacaccaaataattctttgtttagatttaaagtccattaattttacttgatatatccttgttttgaatattctaaagagtgtttccccagaacacaatgtgatatttccttctttaggtttaagactctcttaatttctgcagcaaattcttgtgttctatctggattttttctcttatcattcttcagtgttttctttggggccaccacatatgtgtatgttagactcctttgtcttccatgtttatcattttctctctaatgctttctaacgttttactgatttccatttccttttcctcattgttgttcatgcctttaatgttttcagaagtgctcattcttctttgtgatgcttccaatatggcccctttgtttctgtgatgactttattttgctattctacttcactcctaatggaagcaagatcatactttatcctctgcttgatacttctctgtgacatatttttggtagaaaagataattgcttaattttcttttaaaattagtagtgataaatttggtcccagtttttatctgtgacaacactttctggcaagtgttctttttttaacttgtctttttcctatgcttttccatgattgtattataagtttttgtgtagaatctgttctggtatctctaaaataactgttattaccaatctctgattgagttgagtcctacttgaatcagctatttgtagaaggttttatttgacgtggagcagggccaagttctaagatagcagaaattctctccagtttatagtaacattccttatggtacatagcattggttgtgtacattgcttattttagccagcaaagattaatgtcataggattaagtctcttctactctaccgttctaagagactgacttcttggttcttttttctttttttttttttttttttttttttgagatggagtctcgctctgccgcccaggctggagtgcagtggcacgatctcagctcactgcaagctcctcctcccgggttcacgccattctcctgcctcagcctcccaagtgactgggactacaggcgcctgccactatgtccagctaattttttgtatttttagtagagacggggtttcaccgtgttagccaggatggtctctatctcctgacctcgtgatccgcctgcctcggcctcccaaagtgctgggattacaggtgtgagccaccgtgcccggccgacttcttggttctttattcagtgtttccttccttgattctccatggtgccaaactgtacccaggaattgtcccatcctatgtgctttatccctgaaattgacatcgaagggattattggcttatggtacactgtcagtcttgcagatatgctgactttgtttaaggtctgcagccacagatgtcatctctcagcatctgaccacacccttaatgtacacactgcaacctgccacctttcctcatcattattttccaacataatatattcttcctagttttaccacagcacttgcatttccttttctgatttttcttcttatggagaaggggaaaaaaagcagaaggagcagaagggtctttgctatctcaaaatcagaagtctgttcctcacctttcttaacaacctttgatatggaaaaatgttggaggcttttcacaagcctaagtagattgtaggctgtccctgaaaatgtcatttgtaattaggttgtctggaatttggaatgaattttcttataggaaccaagttgtaagtggtatttggcaaccaagaccagctttccaataggcagtttagctggatgcattgtgttaatagcattattctggctccatagaactaccatttattaagttatttctaaggaaaaaataaattccaagttctagttagtagaatatagaatcttttaaaatgcaaaactatgccactctcttgtttaaaatccttcaacagttttccactgttcataggccaaggatgaaatcctcagcatggcctcataggcccatgatctggctcctgtcggcccttctaaatttgaaccattttccaaactggccttcttattgttcctggaacatgttatgcttcttccagctctcgggtgtttgcatatttagttccttctgcctagaagatctttctctcacattttgccttttcatgcttacccacccttcagaactcagctcaaatttcatttatttgggtagctttcacaggccgaacagccctgccatataccatctaatagcaccagatttccctgtctttatgtccactttatgtctttatgtcccaatactgctcacagtgtctggcgtatactagatgttcaataagtatgtgtggttagatgaatggataaatgaatatccattcattatccattcatctaataaatggataatgaatggataaatgaatagttcaatatttcatgttaaagacaaagctcttaatttcaaacctacttttctgaagttaaggaaatgtttgtcccccttccactcctgatgccctgcctggaatatcttgggtctgggtctctgatgaatcatgtgtatgttacatacaattccaagtgtcagcctcaggataaccaatgctataagtagtccttacgacaattaagggcaaactctgaaaaaagttactaaaaacggttcattatctgaatcctcacagtgttacagcttaaatccctgaaatataaatactaagacataaaatcaattgcattttatgcttgcttaatcttagatatctctatctcaaaacattccaggactgtggccatatatcctggatttttccgggatagtttcatttttaaaatagattaagcctttgctgctagaaagtgcatctcacctgtcagactttgtgtcctgactttttgttcatacaactcgctctctatgaccgtgtcaactatcagtttgtcacaagtatctttttgaaccattgtatgcttcctgcgagaactagctcttgtgaaaagttggagaattttaaaacctcaatatgaaacagaaacgaccttttaaattttaaattaacgtgctcaagtttcactacataaccctgattcagcttcctcacctataagatgtcacgcatggtgcataggacttcgaagatcctcaaaaatggtgtagggaatataatttctgagttcaaaaagatgttagtttaaaaatccgcttggtaaaggtaataaaaggtatctgaggtttaaaagtcccagtgaatagtacggggaagggcaccgtgagaccacgactgtctaatgagccgggtttgacacatgtgaaacaaggatgaccttgttggatcatcagatatggatggaagaatgggagaaggaggagccaactgctgataacaggtatcatcaagtctgaaaacactctctaggcgccttgcacaaagtcaattttattttatttttttggagatggagtctcactctgctgccccggctggagtacactggcatgatctcagctcacggcaacttccacctcccaggttcaagcgattctcctgccccagcctcccgagtagctgagactacaagcatgtgccaccatgcccggctaatttttcgtatttttagtagagatgaggtttttccagttggccaggctggtctcgaacttctgaccttaggtgatccactgtcctcagtctcccaaagtgctgggattacaggggtgagccactacgcctggcctcaaagtaaattttaaaatatcaaaagacctaactcttattcctgtgcaacttgttagaggaaaaaaaaaaaaaaaaaagaaaaaaaagacttgatggttttgtcctttgggcatacaactgcctttttattgaaacattactacctgagccaatggaaattgatttatttaactcatcgccttctcccaccatctccctgctttcttgtctcgccgtttctttacctgaaagagcacagcaaggctttttgttacattgggttgtgttgatcctggatgagtttataagactgtggacttgctccttgcttctagctattagttgatttcatctatcttgagaaaagagaaggcttgtacataggccgatgaggtagtttccacagattcactgagaaattagaagtggttcactgtagcaagccctgaggcatatctctgaaaggagcccagcctttaaagatcaccttctttcacagaaagtgggtccaaccaagcactcctaccaaccctctctaagtcacccagcgattcattgctcagtcactgcatgcccgctgcatgccaggcaccatgcaatgtggctcctatccataaggagtgtggatcctggtggcagagacagacacagataatcacaacataatgtgttaagtgttgggggaggtataaactgctgcgtgagcattgaatctaaaacagttagcttagcctgaagacaccgtggaaggctttgaagaggaagtggcttttgggatcaggcttatgggaagaagagttaatcagatccatgtgggaaaaggaaattcaacctctgagtaccacgttttcttgttctcttctttatgtttttgaacttgcatgtgcttctcctgtggaccaaggcttctttctgatccggtggtttgtcccaccatcatcaccccaggctgtcacttgaggaaaaaggtaaagggaatagagcggggagattcaggcatccagctttgcagtacttgtgcatccaggagccctacttctgacttggtggggtgggatagtggccaagtatttgctttttcaactagaacctgggataaattggatgtcagtggtttccggagaaacatggcccagcaccttccctgtgacacagtgcccagcacagtgttccacaccttgaacccaatacaaaacacaggaaatgcttaacagagaagcaaacgacatcatccttagaactaaaatttccaaatgtaactcctactgccacctgttggtggtatggagatgtgacccacctgcggtttggaagctatctttctttgtaatcctgtcaagttggcaacttaaaacctgaaatttccggagttaatatatactgaagtgccaatggtggttttcttcaggggtactcttttttattatgggctgtgaagttctgaaatgttttgcaatgagttactattttgcaatgagtctatctccttttctattcagaagaacagagtaaagataagagaaaattaaaaatttacctatggggtagacaaagagcaatctacttagttaaaaggggttatgaacaggcaaaagggcatcaccagaaattgagaaagaaaggaggtttctataaattgattaccttcttattaattatcatttttacttggggatggcagatatgcccgactcactggtgctggttaggcgaggccttaatcaaatcgtcaacagccattctcaggcactcatttagcaaattcatactgaatgcctcctggctgccaggcgcccttggctgcagcctccaacagtttcattttggggtatagccaaccttgagaacaagtggctgtcagtggaattcagactatggataaatgctgaagaataacgccacgtgcaagcaaccaagtacaggagcaaggactcccagtgctccgggaagtacctgtccctctaaagagacagtcactactttggatagatgttggctgtcctccacaggcttacagatgcagcttcacagcacatgagagatagaggaaaccgcagacctcagcagggaggccagccctctcattttactgcaagggaaacatatacagaaaagggaagggactcagccaagcatgttttatttgagaagccgtgctattgtctgtctgctggagctgggaagatgagcgtgccctcatgggagcctggtgggatagacagatgcttaaactaacaatgtcactgtagtgtagtcagtggccgtaacttgggctggggataggcaaggctatggggacgagaggaggcagtgctgtgggaccctttgtctctctcgtgcttggggatgaagaacaacagagctttctggatacagacccttggaagaagtgtgtggcttagggcacaaggtcagctgccatgggtccatgggttcaagtcccaagttcattaggttctttgagcctcagcttccatctctgaagtccccaccccatagggctgtttgtgaggctgatataaggaatgcacaagtgcttagcacaaagtgggatgtcagtgcatggcatgattctagaagtcctccagcaatccattcacatccttctataaaagggctatatccagctatggccagttccatctttttttgagacagggtctcaaatccattacccaggctggagtgcagtggcatgatcatagttcactgcagtcttgacctcctgggctcaagcaatcctcctgcctaagcctcccaagtagctggggccacaggtgtgcaccaccatgacttgttaacttttaaagaaaatgttttggtaaagatagtgtcttgctgtgttgcccaggttagtctcaaattcctggtcttgtgtagtacttccaccttggcagttccaccttaaataactaaagaggccctgaggaagtgcatttgcttctttgtgtcacaaccatatccttagacctgaaaccattcccccaacatctctcccacgaccctgggaggtgcttaggcttgaccagtcatgggctccaggtataaacccagtcctttcaatacagacattttcttcccaaagcagacctacagctcacgagggagaggcccacagtctacacccccaataaagatgccccactgagccccagagctagttatgcaagtcgtttagcagagcctctcaaatccccactcttaatgcagggagagttatgggagccccagcagcgccttttaatgcaactggattaattgcctgctcggaaaacagctcgattctaaatgatcctaaatggcctctaatacctgtaatcttccctccgccaggttgccctgctgcattactaaagcgggactggttctggaagcccatttgcttagtaaacagcgggcagcattgcaggaggccaaaggctgagaaattgatgaaatcgctactggcctattcaccagcctaatttgattctagaaaatcaagcagaggcatttggactggactgttccacaagctcagtgttcctttgcaggactgggtaatcaaatgcgggtgtgccgccgggtctcaactctggtccttcccagcccggcagtgagccgtctctctcaggaatcttgatcttctttctgaagaccacagatggagctgacaaggaaccatgatgtctttcagtcaatcaattacctggaaaccaggagtaggtgggggatggcacacaatgggcagtgtgttctcgctttgggtttgcacttatctggtaaacaggtgagcaccacaattaagagaaaaaactcaagttggtgttttagctctgccattactagctatgtaactttgggcaagtaacctctaggtgcctcagtttcctcatctctaaaatagggatgattacaatagtacctacctcaaagggtgacagtgagaattaaatgccttaataaatacaagatgccttgaggtctggctaacagtcaattctataaacgcatttgctgtcatcgcagcttcactgcttccatatgggcaggcacatgccctccctcagcctcagtccctacttctgtaaattgggtcaatggttgttgtgcaagggaatgggggtgaagggtgcataaagtgtggcattgaggtgtccagtaagcaggcttcctctcctgccattctcatacacgctaccactctggaatgcttcttctctgcagctgccctctctctgtccagatggacagtttccatagagatccatgtgaacactgaaggaagacaggtcacctggccagggaggcaggtcgggagaaggtgagccagacccacttggaaaacaaaagatgagcagacaggtgtctgcattttcttcctgtagaccagtgagggtgagggaaagaaatcagacaggctgtgttcacttgaaatatccggcatttgagcctgacattgccttcattgggagctttcaccaaaccagtgtccaacagtgagaacgcttttgaatccttggcaaacagataccagcagacagtgtgtgtggatttccacaaggacagcatcttgcatgacaaagacatcaagatacaaaactaggctgggcatggtggctcatgcctgtaatcccagcactttgggaggccgaggcgggtggatcatgaggtcaagagatcgagatcatcctggctaacatggtgaaaccccgtctctactaaaaataccaaaaaaatttagccgggcatggtggcgagcgcctgtagtcccagctactcaggaggctgaggcaggagaatggtgtgaacccgggaggcagagcttgcagtgagccgagatcacgccactgcactccagcctgggcgacagagcgagactccatctcaaaaaagaaaaaaagatacaaaactagagtgctacagaccgcagccaaacaacactggccatatcttaatcaacattatcatgagtgactctggtgccaaaagccatgtttgtcctcactctgcagtctggatgcctatttatctactgactggctgccacttgatcactctgctcgattgctccctctgtaaaatggggccaactatcaacctacaacataaggtgactgtgggaataaaagcagcatatcaacaatggtacgtatttgttgagctctcagaatgcacccagtgctgcgctaaatgtttaatgtatgaattctaacccactgactcttcccactcgccacggaaagtgagccctgctgttaatccctattatgcggataagaaacagagggaaaaggaggttaatgaacctgcctgaagtcatatatagctagtaaataaggcgctgttaccaaagtccctggcacaaaataagtactcaacaaaaatatgcagacacacaaaaaaaatgagatcatgtcctttgcagcaacatgaatagagctggaggccattatcctaagtgaaccaacacaggatagaaaactgaataatgcatgttatcaactataagtggagctaaatgatgagtacatagggacacaaagaaaggaacagcagacactggggagtacttgagggtagagggagggaggagggtgaggatcaaagactatcttatagggtcctacgcttattacctgggtggtaaaataatctgtacaccaaccctgtaatatgcagtttacctatatagcacaccttcccatctaccccagagcctataaaataaaagttaaaatacatatgatgtaagttggtagagccacttaggagaaaaatttggcaagacctatatctaaagcattacttctagacagctagctatccaagaacatttttgcaatggctaaatagagctattgtgggggctaccatcagtgctaacttttggggaataaaagggcctcatggcctcagggaggcaccagattagttaagagtgaatggttgatgggaccaagtaatgcctgagaatggccctgcagtgatagggccctgtataaagaggttgagtgcacttatctggggtccctgtggcagggcaaagtttgaagcgggcttggttcaggcagggtttggagttgcagatccatagcctattccatggccattggggtggccagatcaggggcaacacaaagattgcaggtactgccagaagtcactttctcatcctgagttcagtgacctcatctataaactgcatatacagataactaccctgtctattaataggaagcttatgaggactcaataagatcggctagtctggttattcctcaccatccctcagggaagaaagaataatctcctgcactaggtttaaagcagaaacgaatgctgcaccaagcagaagcctcagagctctgccagggacagaaacttgagtgtccctgccccggcagagctctgttttaaccatttcataagcaacagcttcccatgtgccaggaagactttattttttcaattcaaaagagcacctaacatttctcgaaagctgcctatgccctatacattatctcctttaatccttacagtaacaccatgagagaaatttccttctgattttatagaagtcataactgatattcccaagaaattaaatgatgtacccattggcagatggctgacaatttggaaactctacatttgcacctaagactatctaccaccaattttcttattaatgatttttattctacctgcagtccctaatacttctttactctaccgtagcacatttgtcaggagatacctgcattcctgtgtgtgaacattttaccattattcactttatgggctatgggaatgtcatgactgttctgggccactgattacacatctctaaaatgaagacagtaacagtttactcattggattgtctcaagattaaataaggacatacataaagtgtttatcagaacacatgagaagatgttcaacttctgtattaattaggaagatgagatgccatttttggctcattagactggcagaaatgaaaactttttttgtaatattaagtgtcaaaaaagatagaggaaatagacactcttctatcactggcagaaaccagagatttaagttggtagagccactgaggagatcaatttggcaagacctatatctaaagcactacttctagatagacagctatcaagagcatttttttgcaattgctaaatattataaccaacctaaatgtctattgatgaactaatgactgaataaccatgatatatctcttgtgtgaaagataatatcatgtaataaaaagaattgggtaaatatgtagtaactaagttgaaaatttctctaagaagtagagacaagtggaaaaaaaaaaccctaagttttagaatattatcaaatgtcacttaggtcaaagaaaaaactcgaaaatgacaataggttttacagatatatatacgtgttggaagtgcattggatgaagcctgcaaatatatacattacactgttaagagcagtattctggaatggtggagaacagccacgagtttaaatggacatagtattacctgatgttataaattttacaaagtgaatatattcatatatgatttgtacacttataaaggtaaaataataacaataaatgcagttataatctgtcaggtgttgactctgaatcttcattttctttcaaataaaattattcatttagaaaacaaacttattgtgtgtctactctgatttactttcatatgacatctttcaacagaattttttcactgaaagggaaattatgtttttattttgctgatgatgaaagtgaggtttggcttaagtgacttgctcagttagtaaggcacagagccaggattgaaaaccagctgtttgcctccaagttcagttctctttcaattaatccagcaagtctttactgagcactgtgtatgtcccaagctccatactaggtattggggatgcaacaggagacaggatagacgtgctccctgttttcatggcatcacggtccagcgagaaaagcagacagagcaacatgtacttacaatgcagtgtgcagtgcttagatttcacgggtaatggcttattcttcactgacgtctgaaacaaagtatggacgcacaactaaacaactagtttaggtctgattcatcagcataaggtataccaccaatgtatcctgctgctccaaatatgttgattctctaatagatctctgaatcaatagtaataatgaagatagttattgagtattaactatgtgtcagatatcattccaacatttaaatataacagatgacacatttaattctcataatatccctattaagtaagttctattacaatctttatcttacagatgtggaaaggtgaggcacagagattataaaaaagaaaaaaaaaacaaaacaaatacacatctgcttaaggctatgcagctagtaaatgctagaaccaggattcaactcagggctgtctaccttgcaaccctactctacactgccttcccaacaaaaggttccaagctgctcagcaggacacccctctcaaggttccttttccaagtcttctctgaaatccgaacatactaatagagtatcagatgtcatccttgtacaagaatcaggagtaggtaaagagagagagaacaggtggggtctttgggctaaatctcatgtcccctgttggaagaaattaataggtcctagaaagagggaacttatttttcagtaaacacaagcatgtaaaagcatcttgacctcagccccctaatcagaggagcatcttgctaattgccactaatgtgattagcagaattaattggccgctcagaaatattacacatcaagtcacatggcgattaatctataccaaaattgggaacatcattgctcagtacagagacagtgagacaactgacctccaaagggaatcctgatgctctcatacattcctcttatgcatcgtgagtatgttgtgcattagacaaaggcagggagatctttctaaccactcacggaggctgcttcactaatagtaatctgccacttccagtccagctagaacttcttcctgcccactctccacattggacacattcatactcccactcatttctccatgttgtttgtgcactgtaatgtatcctcctgaatctttgttgcattttggcaaactcctattcattttccaacaagaggttcaaatgtcaccaatccatgcaactatcactaattctccccctcaggtatttcacattgatttatgtacaaactcctatttcactagcactgttggaccaccgtgtgtacacctaccagtctcttccattggcaatgggacctcagagtcagggatcatgttgttcttaatactggatcttcagagcctaagtacagatcttggtattcagtaagactcagtagttgctgaatagttgactctgtatctccagactaggcgtggggctgagtacacactaactgtggttcctaggcttgagggtatagacttaggaaatatgcagattgaatcaccagggaattatgtgaaaataaccctgttgctcctaccatgtgtttctgatcttggtgaattacaaaagtggaggatcaccatcactttttttttttttttttgtggtaatcgcagggttgggcctggttagtacttgaatgggaaaccatcactttcttgatctctcattgcttaaataaatgatcaatttatcaatgtccttaattgtgatctaatctgccctctccccactagacttgtcttagtctaggtttcacatttctcatcagacacagatacctggagaaagcatcaaacatgaaagatagagatcaaaacaaacaagcagaacaaagcaatttggagggacttgttgacaactaaaaaaaaaacccacatgcatttaaaaaaaaaaacaaactattactaacatccccagagagataacagaccatattgcaaaactgtgaacaaaatattagaaaccaaggaacattcagaaaacaataaaaagctcttggaaattaaaaataggacactatatattagaagccaataaaagggttagaggatgaagctgaggaaatctcttgaaaggcagagcaaaacatccgaagatttggacaataacaaaagtgtgggtattacagaaccaatccaacagttccaacatccaaatactaaagttccagaaaaagaaagcagagaaaatgaagggagagaataaccaacaaaacaggtcaacaaaattccctagatgtgaagaatgagtatttccagagtgaaacagcccaccatgtgctcaaccaaataaatggataaaaattaatccacattaaggtagataatggagcaattttataatgatgagacactgatcatgtcatacaagtttggacagggaattgggaaaaattcatacttaggaatcagaatggctttagctttctcaaaagtcacactggatgctgggatgtaatagaacagcaccttcaaagtagtaaaggaaagttatttccagtcaaattcttccctgagtgtgagagtcaatgacggaaggtcttcacatgctgacctgctgtgaacactttcttaggaagctactaaagaaagtgcacctccaagacaaggcaggaaaaaaagaaaaaaaagaagtgaggatggagttattggcaataggagcaggaatacagcaggagtaaagcataatacccttcttgaaggtagagtgaaagtggaggaagatcccagaggacggcacagagagagcacaacaccagcacagagcaagccagcagctctgggagagctttctgtaggaggatgaaattgaaaaaataactgaagcatctgaatatcttgagtagagctttagataattggcaaagtgttggggctgaattagtaataaaaacataaaaatgaagcaaacaaaccataaacaagtcaaatattagcttcagggaaaacataatagttgtgcaggaagggaaaataatcataatttactgcatggttcagttttgaatagcatttacatagtcaaaatagtgtaaacattgaatgttgatctagccaaaattaggatataacttcatcgggaggatggggaaggtaggtggaagggatgcctgtatgagtgatgggtggggagtacagggaaagcaaaaccattaatagataatggtacagtggaaaagtcacaagtaccaataaaggtagctaattcagaaatatgttttgcataattataaccaggtgaaaagtgtttgcaactgggtgagagaagttggagtctacacttgctcctatcatatgccaaagaacaatttgatgatttaaactatgcgcacatagaacttggatagatttttaaaaatataaaaaaatatacaatgtgatgtcaacaccccataggttaattccaatttaatgtgatgccaataaaaacaccaacaagataattctaaattttatgtgaaaaatgaacaaccaacaatattagacaactgaaaatgatgagcattacatggggtgaaggtgggtgttgggggtagattagctatctatgatattcaagcatactttacatttcagtaaataaaactgtataattccagtatgctagtagacaaaggaatacagtcaaaacttagaagtagacaaaattacagcatggatttaggatataataaaggtggaatataaatcagtaggaaaagagatacactagtatctagtactagtgtactagtaaatagtaaataagtatttactagtaaatactaatactagtaaataagtatttactagtaaatactaatactagtaaataaagctgagtagccatataggaaaaaaaatgcagctggaactatagctcacacaaaggtaaactttagatggagcaaataatcaaaagtttaatggaaaagatgaacctataaaaataacaagagaggctactatttatttatacacttggagagaaggaagcccagtgtgatacaaaacccataaaaggaaagatggataacatatattgaattaaaattttaaaattttaaaaaattttaaatttaaaattaaaattttaaaaaaatctgtgtggctaaaattactgtaaaactaagtgatacggtttggctgtgtccccacccaaatctcctcttgaattatagctcccataatccccatgtgtcatgggacggacctgatgggaaaaaattgaatcatgggggtaggtttttcccatgctgttctcgtaattgtgaataagtctcacaagatctgatggttttataaaggggcagttcccctgcacatgctctcttgcctgccacaaggtaagttgtgtctttgctcttcctctgccatgattgtgaggtctcccaagccatgtggaactgtaagtaaattaagcctctttcctttataaattacccagtcttgggtaggtctttattagcagcataagaacagactaattaatatactatgtcaaaaactttaaactgaaaaaagcataactcatagttttcctaatatagaaagaagtactacaaatcagtcaataaaaaacaaaccttatttattaataagccaacagaaaaactggcacaggagatagtttccagggggaaaaaaaatacaaatgactcataaacatttgaaaagatggtcaaattccagacacataaaatgaaattttactgagatacaatttttcacattttagacaggacaagttaaaaatgtatactttgttgtgaggatgtagaggaaacaagcactgttatgtaattctgtaagagctgagacgtgacacaatctatgtagagaagataattgaacaaatctatggaaattacatctgcaattaccttaggacaaagaattctacttctaagaatttttcctactaatatactcacacatgcatgaaataatgtttataagaacaaatgactgcaaactacttatatatctattagcaggggactgttaaatccaccaagtttcattcatatcatgaaatcatagccattttaaaaagctctttatgtaatcaagtgacttccaagatatattgagcagtgactaaaagaaggtactgaacaagaggtctataaaagttatgtgtacactatagtctattaagtgttcaacagaattatgtctaaaatacatgaacattacttactgaaaaatactttgttgctgaaaaatgctaaggatcatctgagccttcagcaagttgtaatctttttgttggtggagggtcttgtctcgatgttgatggctgctgactgatcagcgtgctggttgctgaatgttggagtggctgtggcagtttttaaaaataaaacaacagtgaagtttgcagtatcaatggactcttcctttcacagaagattactctgcagcatgagatgctctttgattgacagccttttacccaaatgtagaacttctttcaaaattagaatcaatcctcttaaaccatgccactactttatcaagtaactttatataattttctaaatcctttgttgtcattttaccagtgtttacagcatcttcatcaataaaagattccatctcaagaaaccactttctttgcttgtccataagaagcaattcctcatttgttaaaattttatcatgagattgcatcaattcagctatatcttcaggcttcatatctaattctatttattttgctatttccaccacatgtggaacgacttcttccattgaagtcttgaacccctcgaagtcatctgtgagggttagaatcaacttctcccacactcctgttattattaatatcttgacattctcatgaatcatgaatgtccttaatggcatctagaatggcgaatcctttcctgaaggtttcccatttattttgcccatatccatcagaggaatcaatatctatggcagctgtagccttacaaaatgtatttcttaaacaagacccaaaagtcaaaatgacttcttgatccatggtctgtagaatggatattgtgttagcaggcatgaaaacaacgttaatctttttgtacatctccattagagctcttgaattaccatgtacattgtccatgggcagtaatatttagaaataaatcttttatttctgaggagttggtctcaatagtgggcttaaaatcttcagtaaaccctgctgtaaacaaatgtgctgtcatccaggctttgttgttccatttacagagcacaggcagggtagatttagcgtagtgtttaagagtcccaggatttttggaatggtaaataagcacagtcttcaactcaagagtcaccagttgcattaccccctcactagagagcaagtctgtccattgaggctttgaagccagacatttgtttctctctagctacgaaagtcctagatggcatcttcttccaacttaagacttttgtctacactaaaaatcatctgtttagtctagccaccttcatcaattatcttagctacacatgctgaataacttgctacagcttctgcataagcattggctgcttcaccttacacttctgttatgaagaaaacttatttccttaaacctgatgagccaagctctgctggctctaaaattttcttctgctacttcctcacctctctcagcctttatggaattgaagagagttaggaccttgctttggattaggctttggcttaagggaatgctgcggctggtttgatcttctgtctagaccactcaaactctctatgtatcagcaatatgactgtttcactcctgttgtctggagcatatcacagatatgtaagaaaacccactgtatgccagactttgggtagaggggacatttattgtctcagcacttgggagactttccactcctctctcaggagagagcacagagagtagcctggctgtttatgtgagaatgcaggcaccaaaagcctagtaagcaagtaagatcacatggtcttgcattcaagtcttgtgtaagctatacattcctgagcttttaagaataacagacatgggtcttctttttttatttaaaaacatttttattcttaagagagacaaggtctcattatgttgcccaggctggtctcgaacttctgagctctagtgatcctcctgcctcaacctgccaaagtgctaggctactggtgtgagccactgtgtctgacccagacatgggtcttctatggctgtacactccccagcttcgcctttagatccaaggcctgggcagaaaactagcagtgctgtgaaggaacatacggccagacaccaagccaagtgcctcagggctctgttttccttcctggcttgcccatgcacatttaacttctgccacttcagacctgcctggatcctcagaccaggccccgttaaggtcatacccttatctatccacctgtgctggcaaagtaaactctgctggacttttaccttggaattccgtagtaccggtcaagccacacaccttttcccatgcttcttatatgtgtgaaacaattctcagttacctggcaaacaggagtttttaatccaggggttcatcaaaccaccctagtaggattctgcaagtccagctagaagcagccagagccagctgacagcagtgtgtgcagccctccacacaaacggccatttgcctgccaccaaaagccactttttgcactcaatgcacacccactatggcgagattctttttttcccaggtaccattttgctcaacccacactttcaattccccagcctatcctgaggaaacaaacctaggctttactcccctacccagaaagagtcttctcttcctactcaaactgaaacacaatgatttatatccacatcacatgtttaataaaagagaaccaatcttgattgaaaatcttttgagaagtggtcagcactctcacaattggttgaaggcacttgggctgggtctggttaaatctctattctgggtttgaccctagggcaggtcacatggagctggcaatgaaagactcccataggctgttaggccatcttcactcacagaagttagcaacaaggtccacaagaatagcaacaagttaggagaaattaaatgcatctgtatgtttctaagtgtgtgtcttcatttcctgttttagatattgtttatatctcagatagacatttatatgtatatgtgtttttttctatattagtttaaatatctatatctataaatagttatacataatatttcttatatctctttcaatacatacaaatacatgtatacataggtaaacattcctggtgtatttgtgtgctcattatagtagcacttttaattttcttcaagaactttccatttgcactgataaaagaaaatcttcagccaaattaaatttaaaggtgtttaattgagcaatgaacgattcacaaatcgggcaaaccccagaattacagcagattcacagagactccagcgcagccacgtggtggaagaagatttatacacaaaaaaggggggaaataatgtacagaaattgaaggtgaggtacagaatggctggattggttacagcttggcgtatgcattatttgaacacagtttgaacactcagcagtgtatgattggttgaagtacggccactgggattggccaagacttagctattgttacagctgcatactactagttaggttttcaattctaacaaacaacagacaaaaaaagaaaaaaaaaacaagaaagaaagagaaagaaatacggagtccttctcaggccatatttaatttcctttaacagtgtttccaacttaactaactgctttgtgtaagaggtccagcttggtgcctgtctgtcttggctttcagcatgccttcctcactaagcttaatcacgtctagctttggatttaaagtgagagacctgtgactcttcctttcacttgaacacttagaagccatcgtagggtaattaattggcctaatttcaatatttttttgtttcggggaatatgggggcccaggagagggagaatgacaggagaatggatggtcagtggacagtcagaacacatacaacatttacccactatgtttgctcattgctagaaaggcaacgtttgtgcatccccaaacaattacaacatcaaagatcacttattacatatcactgtcatagatctaatagtaatgaaaacgtttgaaatattaagagaattactgaaacgtaacacagagacataaagttagcacatgctgttaaaaaaaatagtgccttatagacttgcttgattcagggttgccacaaaccttcaatttgtaaaaacatacaatatctataaagctcaataaagcaaagtacaataaaatgaggtatgcctgtgtacgcttttgtgtgttttgaattttgagcctcagaactctaacacttatttagaaaattacatgttacattagcaaaaatcttgtaaaaatgctacctaagaagctctacagtaagtgaaaagttcagaaaagtggaaacttgctaacatggacaccaagaaatactaaaattattttctatatccttgtaagttatctctttccttaattagtctgagtgacataaactttctatatgtatatgtgatagaaacactgtaaaatgaaaaaaaaatatattatttagagactttatagtcacagaagggaatagatgcattattttcaaatgaggaaatatttttattaatagaaaagcaagtcgagtcttagaataaaaatcacatcattaattgacagataaaagactgataaagttcaacctctacttttgattaaatctttcagcaaactaagaataaaagataacattcttaacttgttaaaggttatacctaaaacctatagtaaatagtatacatttttgagaaactgtagaaatattccctttaatattaaagaaaacacaaaggtccctatatcccaggttctgcttatcaaagaaagagaaaaggatcagaatgaggtgtaaatattagaaaggaagacatataattgtcattatttgcagataatacaatcatatatacagagaatgccacacagtcaacaaactattagaatcaataagttttactaggtagctagatataatatcaactccagaaaatcaatagcatttttctacaccatcaataagtaactaaaaaacacagttaaaaaagataccatatactatgataacaaaaactataatatgtttaagaatcaacaatcaagaactcctaagacctatatgaagacaactttttaaaaaatctgataaggtaatggacatgaaaaaactcaacaaatccaggcattctatgatcttggataggatacaatgatataacaaatgtgctatattattattaaattaatttacaaactcaatgcaatcttgtaaaaattctaattggactcctataagaactagataaacttagcttaaaatttataagaaagaataacaatccatgactagctaagatgaaggatggtgacttgcccaatccaatactgaaacagaacaaaaggcacagtaatagtggaattgaataatgagctctgagaaaggccaatgaaaatataaaaatatatcatgtaataaatgttaaattgcacatcaataaaaaagtgatggacagatttgtagatatgttggaaatactggatcaccctatggaaaaaaataaaacatgcaaagatagatttcaaatggatcaaataacaaaacataaaaactgaaactataaagttattaagagaaaatatagaagactatacttgtgacttaagggtggaggacttaagacttgaaagacacacatcataaatcaaagcactgaggaattttattatctaaaaattatggatgtatattcagtaaaataagcagaacacagattgggaaaagatacttgtgatgtcttaaatcgacaaccaaataatatccaggatataaatgcaactcgtgaaaatttaatagaaaacacaggaaccctttctccaagaaacgcgcaggtgttatgtgaacagtcaataaagaagagggaaggcaaaatattaaggagcattggactgatgctccaactcattagttatcagagaaatgaagatgaacacaatgtacagtcatttacactgaataggttggcagagaaataagaaagctaggtagtgctactccagggcagagctggggagctctagaaactcacctgcagctcgggagcatggactagtgcaggcattttgcaaaacaatctgttatacttagtccaactaatctaatgtaaacccagacattcaactccaatttatagtccagagaacttctcacagggccctctgggtgaaagtgtatcagaacatcataggcagtagcggtgatttggagacagtctgctcaccgattacggggtaatggataacaaaagtgtagactatgatgcaaagcttagaagtaatgtgtgaaatgtacatacagtaatctggatggaagttaaaaaaatagtactgattgaaaaaaaaagggtgaagtagaatgagtgataaatgatttatccgtgtacgtttaaaatactcagattaacaaagtaaatttttcctgaacacaaacaaagcagtgtaaattaaatgtattaagtgggcagtggggttggggagggacacgggagcagagaagaaggagataagagggttactcaataaaagaaacaagcaggagtgctttgtgtaccaatgtgattgaatgctataaactgtggcccatcattaactcaactacctgcactagagatcaacagaaaagtcaggttcatctcacctccatgaaataaatcttggagaactatccatgtgaagaggcacctgtttattcatctgcttagagccatgtgtaaacacatgcccctcagtggcaaaccctcgccacagctggtgaatgggaggggaaggttgtggtttatgtgatgcacagtctctagtagccagctgcgacaacactgccttatttcccattgatcagacacacctagggcatctcaacactactgtggaaaatcgtggtagtgggtcaagaaaatctccagggcagatatctactttgatttatttctatctcaaaaattaatggaataaatacttcaaaactttgccaaaagtgcttagacaaagaccagactgtttgtttcaaattgaaaatgggcatgaactgtgaatggctcgagattttgtaatttttaggaagactgtgggctaatttgcaattgaaaaatcacgagagccatttatagaatgaccactctgtattgaatagctatcgctttgtcttctgtacgccccttgcttttgtgaattgtcactctcctccatgttatcctgataggttgccaatcacctccccaactttcttgccataggggtacgtatgtgactttaggaaggacagtgagagcctgccattaaagactagaagtatctccagaccaccgttccaatttcttgaagggactcactagcaaatgaaaataacaaagagaaaagcagtgatgtgagtgggaagggaaaggggagagagggagagagggaggaaatgaagataggcataaggcaaatgccacccctgagcttttaaattatatgaaccatgaaattattctttggattagggtttttttttagttgagtttctatcagttgaatccaatagaatagatatcccacctcaaaacacacaaccagtgaatagcagacctagttgcattcttgatccaaagccaagttaccccctattaacccatggtatctcttgcctagacacaaattccgactggtacaaaggaaccactttggctcctggcacagacatttattgcattgcggggctaagctgcatcctttataggtagatctaagttttagaaattgctcaagattacacctgtggaaaaaaagagaaaacccagattacatctgtggaataaaactgaaagcccttccagaaaacactgaaaggaaataagcatgatgcactatgtatctatcatacacttggttttgaaagcatttctcagtgtgtctaagtctgatttgagccatggcctcctcattaccacaagtaaattgccaccaaaggaggcttctttgaaaagatacagggcacagaatgtggtcatcggaattggactcgattctccccttactgtgtgtataactgggtaatgtacttaacctctctatgcttcaggggcctggtgtataaattggggtaatgatagcttcttcatgcattgtttttcatagatgaaaggtaatcaaacacataaaacatctggaagaattcttgcacattgttgaccctcaacaaattatatatctctttatataaggggtatgttttatggatttatgcatattagacgttttaaggcattaatcctggtgtattgattaaaacatctgccttgttactctatcatcataccctgcaaagagctgggccactcccatttcatacacttccccgtgggctcattcttttagaaatagtcatcaggcacacacaaaaagcaatttaaatggttcatctttcctcttttcatccatagacaaatttcaataattatcttagtcaacccattaattagtctaaatttgcccaagcataattgatgctgcctacactattttctataaaaatttgaaatggatggctaaacagagattttttttgtttgtttgactaagtgcattttccctctatgcaaaatgtgttagtcaatgcttatctggtgtaataagcttagcttttagtgttcgtgtctacatctgtgatagaaagaagtttgaatctctaagttcaaattatgcattggcaatttctagcttgttgacttacggtctgccccttgaactctctgagaaaacctgtggccttacttgttgaatgggggtctggctgactagccctgccttctggaacccttcacctacctaggttttcccagataaacattggtatgactactatacccacatccttgagtactttgttttcctggaccttccccattccttgcttgtttgttttccctagggttccagtcattcttaatccctttctactatttagcaattcctggataatctgactgatctcaaactttcattaccacctatacatgaaggggatgcttctcttatgttaccatcagtctataacaccaactttgctgtgcatcattcttttctaacctctagagaattcttttcaacaggtgctgtgttcctcacagaaactattaagggaataaatatagggaaacctacaacagcataaaagcctcaaggtttgttgctggactcatgatgaagatgagaccagatgaaggaatacatgaaaggaataactttcaaaccagcttcctgagcaatttcagataccctgggaatcagatataggcaaacaatacctccttaacctgaattgggaagagagatggcagatgccactgaagacacatatgaagcacagagcaaaacatccagaagcaaacacaaacataaataaaaattcagaatctaaagatcgatcaatgcagcagaacaatgttacattattcaatagtcttgccataatgggttaagtgtgtgaaaaatatccaatcttatcccaaaataaatgctagatgaaataaagctctcagtgtagcacaaaagcaaacaaaaatgacaccacaatttagatgaatataaaattttttgcacgaaaatgtttttacaatacatcgaaaccaaaaccattaaaaataaatacatttaatcacataaaggatcatattttctcatgatcctaggccatcaacacattcaaaggcacatgtctaaattggaaaatatttgccatgcatagaaccaaccaagattaatgctgttaatacataaactgttcttacaaatcaatgagaaaactaatgagtatccccaaagaaaaatgtacaagggaagtaaattcgtagtttagaaaagaagaaatacaagtagccaggaagcatgaacaacagttccactttgggtatcaaagaaatgaaaattaaaacaataagatttttgatatatgatgtttttattcattaaaatgaaaaatagtctcaggtactggcaggcaagggcaataagaaccgccttgagtagcggtacagtcaattttagaggtcagcctggccctttttagtctatatctctattctacatctaaaatttcaaaatgtgaataagttttcacttggcaactctacttctaggaatttacctgaaagaatcatgtgaacttgcaatgacgcatgtacaacaatgctctctgaaatggtataataatggaaaattggaagtagcataaaattcaatgataggctagctcaaacaaaatctcttcccaaaagagttctttaaatttatttcttcttcctcactatgtgccattctgtgccaaacacacaccagtctttcttctccacacatttttcctttctttctcccacatatgcatttactttctctcagcccattttcactctctctcatttttaccttctatctcccccttccactcacatttactttccttcttactgaccatttttcttttctctaagccatttttgcttttcctctcatgcatgctgtcttcctttctcctttcccccaacactttttctttttctctgtcactgacttttaccttctctcttatatccatgtttacttcattctcacagttaatagttttacattctctctcttgcactttcattttctttcttacacatacttttacttgacctctctcccccacactttcactttctctcccacaccgtgacttttacacacacctttttatttttgttctcactcagttttcctctgtaacccagagaagagggtgaaatgtccagattagagtttatccagtcacggggcagccaggactgggttgagacctgaagcaggaggctgttgcagtattccaggatggagcttagttttttctaccaagcagcagtagcaggatggaggggaaaactgtggatgcagaagacatttctaaggtggagctgatgggtctgagcaaccgtttggtgaatgaatggtagcatctaagatgatgtcaaagtttctggcagggacagcagagtagaaaatgtcaccaaggccgcagaaagtggtaaaaggaaaaggcctgggtgttccttgatcctagagcacctatatctaaggcaatataatctttgcaggattttcagaccaaaaaaaacgttcttgggagaagagaaaagagtccgtaattgcctacagagagtccttgaattttgtttcttcaactgagcaattctccctcttgtatgccattcaggggcatccttaaaatatttttactccaatgtctataatactaatctgtatgtctttgtgtatccaaaaagcacttgtacccccaaacctactgaaattcttaaaaaaaaattctgtaaaacttaagcttcgtgcattaatggattttttaaaatagagctatcacaggataacaaattttgcccaccactagctaaatgctggctgcatcatctctttgcacaatgtcattgacacaattatatccccaaagggcttgcagactctgtgagggcagggaggctgtcctcactgctcagcacaggtcccaattgcctacaagagtaacagcctcttagtgggtactcaggaaatatgctgggatgaataaatatttaaaatctttctcatgttgtcagtcattattgttctgtaaaaactgaaaactgaagtgaaattatggaaccactcgcatttttgatgataagtgcaggcccataaacccgaggcaatgatggaaatcattaagcatcattggaagtggtacatttttagtttcaattggatgcttattggacttaagctggtcaaatttgtgctcaagtgtcaatgaaaagaacaaaattaaagatatattgaatgttggaaacagagctttgaagattttatgtaaaaggtgaggcaagttggggagttattattttttagatttcttgaagcaaacctcctcactccctaccacaaaaagaaaagctaagtcaaccgttccaacacagacatttgacttttatgcaatttttcaggaaagtattgtgttatggagtaggagctgcctgtcccaattgcttatcctagtatttcatctacagagacaggtgaattcttgtcagcagatcagattgtgggaggtgacagacagtccagctctccaatgtgaccttcagaataattcagagcattgctgctacactcctggggacagatggaaatctaatgggtacagaatgctctgggcctggaaggaaggatttaatgctcagagaggcacttggtacatcatccattgtttatcttcatgtaaaagattgtttaattaatcaactcaaagtattcatgctactttcccagggtctgaggatacagtcatagaaatactgataaaaatccctgccctcatggagctgacagtctagggcggccaggtgcagatagaaaatttaaaaactaaataagtaaaccatacagaacgataatagaacatgatgagtacgagagaaaaataaagcagcaatcacggcaggcagtttaggtgttgctagcaagcaactgcaactcccaatagggaagtcagggaagttgtgctaggatgtgttattgttcaatatccattatttcttccactccaagatgactatgcatcccggcatcccggacaccgccacgtaacttatagtccttccccgctggctgaggagacctccttgccccagagacaggaggtttgccatatgacttgttttgacaaatggaatatgagcaggtattgctgtacagaacatctaaaggaatgtacctgtgtcacttagctcaatctcttatgtctatcgtctaccatgaaaatgaaatgtcctagacaagggctggtcctcccacctgcttgtggaatgagaaaacatgtggcgagagccatgcctccagcaagcccacacctaggagggacgtgagcaaggaaaaaacaagtttgtcatgtaagccaatgataggatttttctgttaccaccataaagccgattaatataaaaaagcctttctaagaggtgacatttatgccaagactggaaagagataagatgataaaactgaggcccagagaagtgatgtaactctctcaaggcacacatctattaagcgacaaagactctattgaaaatctttctctctgcgtttgttcacactatctcctcaggcagggacttgcctagctcagatcacaaaacccacagggtcagcaatattttcccatcctggccaattgtatgtacagcctccatccttaagttacttgaggcacatggccctctcctgcaactgaagagaagtgtgactgagtctgcagctgaattcttccatctccttctcatcttttacatctcactagaaccctgcaattagcttgtgagacagggcaggatggtgaatatcaacatctcatatttacaaatgagaacacttaggctgggagctaagcgacttccttaaaatcatgaagtaagtggatattggcggtggaaaccccaccttcctgaaaccaagaatatcactgcatcacttgaatttttatatacttgagtatttgagcatcaattcgctatccctatatatatatatatcccctatctataatagatagatgaagaaattaaagctcagagacatgaagtaactctcagaagttctcacaacttagaagagcagattagaatcaaagatttttctcactccagaacctgtgcatggtatgagccctgtcctctttgtgactttctatgaggatgcagaatgatggctgttggccacgaaacacattgcacaatgttgttagtttaaagaagttcaatgaacattattgcttagtcaattcatcctcaactgagtgacattgctggtgcccagggagagccagattcaatgttcatgaggaagctgcatatcatgatgtgccttcaatcagaaagagctactccgcaccagggtctgagaccaccaccagccaaatgtctaagggaataacagtgagagggatgcgtgtctctctcccctgcacttttgctttgccagacacttttcgctactgggaaagactaacatcctatacatacagaaggcaacccagtgtggcagaggcaggatggttagggttggaagttcagctcttccatggaaaggctgtattgccttaagcaatgacctcaaaggcttgttttgcgggctcaccccacaactcattcattgattccttcattcacttatttaaatgtatattaagtactcattatatatcagttattattctagaccctaggaatacagcaatagcaaccagacagtctgctccgtgaatacctccaaacccttaccactgtttcactctaaatgtacagaatggctactctgctcctaccccttgctctgcaaaaagggcctctgcaactaacacagtagtcccccagatcacaggaggtctcagagccagagacaggtcatgggcaggtagaattcccctagaatctccatccctctgctaatacaagtaaaactgactcataaccccacctttcatgacacccttgggcagcccagcccagacaactctgctaccagaggtcaaactattagcccttctcaccatttttttaatgtttccaggtgagtagaagagcaaatggatccagacaatcaatagcaaggggacagaaagtcattgtggagtagcaacttttgcttgtataaaattgtaaaaacaaaaacaaactatcaagcaaaaatagacatacgaagaaaatggttgagtttcctatgtagagaaaaactggaaatgtgtacctcacctttgcttcctttacctggataagcccaatagcccagctccaatgttgaaattctcaggaaggctggaacagccattcccctgacccaggagacctttcccatggccaacccattgggcaattacaaatagaaatattctttcagttaaatgaatgaattacttgtttaactgaaaggtagttagtattgtcactgttggtgtttgttttaaacttttacattcaggggtataagtacaggtttgttatatagataaacttgtgtcatgggggtttgttgtagagacccctggtgttcatcactcaggtattaaacctagtaccctttagatatttttcctgatcatctcccttctcccaccttccaccctctgaaaggccccagtgtgtgttgttcccctctatgtgtccatgtgttctcatcatttacctcccacttataagtgacaacacacagtatttggttttgtcttccagcgttagttttctaagtttaatggccttcagctccatccacgtccctgaaaaagacatgatctcattcttttgtatggtacatgtaccatgttttctttatccagtctaccattgttgggcatttaggttgattccatgtttttgctatcgtgaatagtgctgcaatgaacatacacatgtatgtgtgtttataatacaatgatttatattcctttgagtataatcgtaatggggctgctgggtctaatggtatttctgtttttaggtctttgaggaattgccacaaaaagtaatctcatatactgttggtgggagtgtgtattattagcccagtcactgctgatcttgacaaacccataaagaagaaaatggactcacacggcacagaggggtatctcaaacccaactctactaatctcaaacccaactcaccctcatggattttccgattcccatcagtaccggcttagagttactcttctgacgaatattgcactgatgtaaccaccgacaatacagccacgtgcatttaccttaaagtgttgctccatgccagcttgtggctgatgcaaagctagctggccagaaataggatccttgggattcacgccagcttggggatcaacatccctaagactctgaacagaattctccatgtgaaggagttggacacactgtgaccaagatggaagctttcatgtgtcgactggatggtccccatcaaggctgtgtgagttttctgggtgaactccatgaggacaaacaccccaaaatgaggccaaaggccagatgttcctgcacggtctttccacagtcctaataatatccttagtgcttattatgaactatgggtgattatgctgatggaatagaacattgtagaggcttaaatctatataaatttctgcaaaattctgccctttgagcaggatttaatgtttaattccatgctgcctgatctgtgatgtatacaaggattccaagttataccattcacctgaaaatctgcaaaccaccctggaatttgtcttcatcgtctttctttttgtggccccagagaccatagttacagggaagcaaggctagatgggggaagcttctcgtcttagcaacatatgtaacttatgcaaagcagctagtagagtcctggcacccactaggtgagcagcaaacctgttttcttgtctctatgccatacttttgttttccaagaagttcatttgatagatttctaatacattccaagtttctgcctcacgatgtctaaaggcatgccattactattaaaggagggacagtaagtgaccagcaagagaatggaatgattaatctagagtctacagggcacggcatgacattatagtctcttccattgatgctctttgacccctgacttgaagaagctgggctctgagaagggagaacaacttggtctccaaacatctctgctgatgctattctaaatgcaaagaaatgtcaaagctgaaataaccataatgcaattgtacttagcctgtttgctgaaatatcagtcattgctttgcacagcaattccatttttaaagttcattgtgctagaaaaatgttgcagctccttaattcttacgttctcatccaagccgggtgggaggtgagaagtttttgaactgtatgaaaatccatatttcagcagcattaccgagctctctttcagcatcctgcacattttctcttccctgaacccagagaaatctcccacttccatggcctgccctcattttgacagcaaacattaaaagagcatcggcagaagcacagatgaaaaaagaacaacacagggttgctgagcacccatcctgttgtctgaggaggaccaggctcactgggaactctgggttgagtctggttcgctcaacctctaagggtatcaatgactgatgttctggaagccgacttctacaggttgcctcaatgggctcttggtttcgaacttctggttatattcagccaataggaggtacaggcatgggattggagaataggaggatggcgaggttgggcagtgattctctccctgcttttccatggtttgtacagtggctacattctcctacagcagcatttctcaacctcagttctattggtatttgaggccaaacaactgtttgtgatggagggtcatcttgtcttgtgtgttgttggatatttcaaagcattcctggcatctactcactgtgtgccagtagcacactcgccaggttgtgaccaaaatgtgaccaaaaatgtcctctgggggaatattgccaatttctcatagggagcaaaattgcctcagggtacatctctatagacggccctttcatttaattcccactgctaacccattcacaatgctctctgcaagtagctgggaccccaaggtaagtgaatactagtatatgtggtcctcaatatggattctctttgtatgtaattggaggtgctgtgtcctttagcagactgcaagccttctgagggcagtgactagggctcccgcataaagcacaccccacccaggaggcttcaagcacaatgtggccactggaaggaaacacttctaggtgctgctagaatcccaggggctttagtgaaactctctctttcctggattcctcctcagtggaagcagaatacacagggacactgctccctccactctccacccccagcctctttttataatgactcttcctgtctgtgggctacttcctcctggggaacagaaggtctaggaggcctctgaattggcaccagcgccctgtggttaacttgtgtctggcagcaaaagctgctggtccctaggatgcagcaatcacctctaaatgaggtctgcctttgctacatttaaggactgtaacaattgctttttctcccttggaaatataaccttagagatgaactgctcttgattcagtaaacgtctgtgccagtttccttagaggctaccatgagaaggtactagcctccttccacaaactcaagaggaaagcacaaacctgcaatcattgcccattttcctaagtccctgcatagggctgaggccaagggcagaggctgggccgggactctagaaggcagcagggaggtgtgttgggtctgagttgtttctggattgcaagtgtcattgatgcatatttaataccaatgacactgctctgctgtcactatcagtgccccatgcaagccttggggacatcttaaggaaaaaactggcataaatgatcccataggtgtgtccctgtgaagctgtgtttaaagttctcctagattatatttagatcctggcatggcttctccagttatggaactgtgtgtactgctgtttggttcttgccaggtctggtttttcatggagtcagggtgtgggcttagaatgctgatctccacacttggtcatgctgcttgcctttgccaagctagatgtgctaaaggagtgagggatcaggagaactctgttcctggcccccagtaagcaggtgctgccagttcacactgacacgcaccgctgaagagcataaaactataaaatggagtttctgcctcagtttccacatttgtgctagatttctgttgggactgctgcctcattgactgtaaccctcatactggctgttgttccccccaaaaccctctcagggatggaacctagagctagctgtacctccatccgattggtgatggaggaaatcacagttttattctcccctggctccagcgttgaaatcaggcagccttggtctaaaacattaactcagagccagtcacctcaccttctgggtttcagttgcttcgtctgtaaactaatgttgaatattttaatcctttcccactattttcttctgagctgtaatttgcattcagtaaaataaacaaatcttaagtgtacagcctaatgaatttctatacattcacatacctgtcatccaacccaatatagagaatacatttccagccctccagaattatcttgttccctaacctaggtaatgccacacccccatagggaaccactgttttggagttcatcaacatgagtagttttgcctgtttgtgaatgtcatatatatggaatcctacagtatatactgtttgcgtccagctttgtttgttcaacatataagttttgaggttaattcacattatggagtgtacagatagccagtccctttctgttgataaatagtattccactgtagcagtacaatacaacaatgtatccattctactttggatgtcatttgggttgttttcatttggagactattacaaataaagctattaccaacattcttatgtgggaatgtttatagaaatatgcattcatttctcctgcgtttattccatggtccagtaccagggatttaagcaccaaaattcattccacacttaagttcctcatcagcacattttgatgcccagaggcacctgaggctcagcaggttctacatggagtccatcaccctcatcactcagccctgacaatccctccaggctcagggctaaacatctcctccagggctacaggccagccatcctcagcttctagtgctttgaatatgccttattctccttctatcttcctggccttcagaataaattaaagtcagatgattacatcccctttatacagaaatatattctagaaagattaaaaactcgaaggcaaaacaaaacaaaacaataaaagtgctagaagaaaatctgaagtatcttttcatattcttgctttggttgcctaaaagtgtaataaggttaaaagcaaggaagaaagactgaaataaaaattaaaaacatctctatataaaaagagtataaagaagacaaatctgttaaaaactaaataaatttatttagtttattctttactactaatgtgtcgaaaaacacatattatccttaatacgcaaagggctcttgcaaaataataagagatgtgtaaagctccccaaagaaaaaaatgcataaagaagtagcaactggtaatataaaggtccaataagcaagaaaaagttgctcaacataatcaatcaacaaagaataacacattaaaacaagctattattttttactaatcagattagttttcagacaattgatggttttgggaaattagacctctcatatgctcttggtagaattataaatcaatacctcttttccaagaagatattcctatgatgatcaaacaccatataaatgtggccaagtaattcaatttctaggaagatgtcccaaggaaatggttgtatatatacacaaagatatgtaccagcctgttcataacagaagtgcataaaaatttaaaacctgaaacaacccaaatgcccagaaataggaaaatcatgaagtaaagtagggtacatacatataatggaattatatgcagccattaaggtgattggataaatatgtctttatcatggagagctgttcatatcctttttgagagactgaagtaggttgcaaaaaataagtcaagatatgattccattattgtgcatgtgcgtgtgtgcacacacatgcccacggcaagtgtttggaaggtgttctattcagggtaagtgaacctcagtaacctcaaagatttaacacaagaaagatttctttttcgctcgtgtcacagtcaaaaatgaatctgcagggtggctctgcttcactttgtcattgaaaagcccaggctccttctatcggtggctccactgtcccaaagagtcttgaagtccccctctggaccctctgtatctcaccatcagaagagggaagaaacagtgggggtggggtgtttacagggccagggctggaggtgactcatttcttcccaaataccactaaaacataaccacagggtaacccctaactgcaaaggggctgagaggtgtagccttgctgtatacccagcaaccgcctagtctccttcacagaaagaaacagcaaaattctaacatgattaggtctggctagaaatatttgggatcaactttgctttctcctttcactcttccacattgcccagacttttcccaaaagatgtgggctacttttagaataagagcagaaaagcccaatacagctattgccagccttccatatttgcaggttctgcatctgcagattcaaccaatcatggactgaaaatatttgaagaaaaaacaattagaaataacaatacaacagtaaaataccagcaaactaacacaggaacagaaaaccaaacaccgcatgttttcactcataagtgggggttgaacaatgagaacacatggacacagggagggtaacatcacacactggggcctgtcaggaggttgttggggggacaagggaagggagagcattaaggcattaagacaaatacctaatgcatgaagggctcaaaacctagatgacgggttgatgggtgcaggaaaccaccatggcacatgtatatctatgtaacaaacctgcacgttctgcacatgtatctcagaacttaaagcaaaataaaaataataataatacaaataaagaaatacagtaaaacaactatttacatagcatttgtattgcactgggtgttgtaagtaacctagagatgatttaaagtatacaggaggatgtgtataaattacatgcaaatacgacctcattttatatgaagaacttgagcatccaagaattttagtatccaaggagggtgccggaaccaatctcctgaggatactgagggtcaaccgtatttccattctgatggctttgcagaggaatcagacagtcctccactgtaaatcaagctgcaattagtgccctggtgttctggcgccccgggtccttcgtgttagagctgggacatgaagacagcacccgagaagaagggggcctgaaatatccctggctgcccttcacatctcaaaagacacagacactagtccccaaggcagctcacagcccacccacctggaactttctccatgcctgggaggcctcaaactgagaagcaaaccccacgttgctgtgtgacagggcctgcttctgtccgcctaggtgcacaagtgcatcccaccactcagaggaatactccccacaccaccatttgtcactgtcagcccagggagcaattatattccatccggccagaaataaacagacaccagcatcacacaggagatgacaggcagacacactgcctctgatgcacacacgtttttctcatgcccagctgtgactgagcctctgggcacagatgcagcccagagcctggtgggaaaagcaaatcaatgagggcccttagaggatctcgtaagctctctcaccacttgctcttttcaggtagaatgaacgaatttggggaaaagcctaacttttaaattaaacagttgtaaaacttctgataaaaatgccattaaagaaatttatgagattaaacacatctctatggcttctcctgcagatcagcctgtgggtctgaaggcctttggatcaaggggatgagcgcattggtgtgggagccggggcagggagtggggtttgagctcctgcagcactgcttaacagctgtgcagtcccagctgggtcctgtaaccttcctgccttccaaagggcaatattaccacttgcccttcctccctgcttttattaatgcaattttctctgcttcatatacactcctacatcctccttatggcagagacgacttgctctctcccaaattcactctcaccttccatcacacagggctgtagctaggaagcagctactcagctagagagtatatttcctaccctatgttggctatgtgtggcttcaagacaaggcttttttacattgtgcacatgtaccctaaaacttaaagtataattaaaaaaaaatagattcaattttatttatttattttctcttttgagacagagtctcactctgtcacccaggctggaggtctgtggtacaatcatggctcactgcaacctcaacctctcgggctgaagtgatcctaccacctcagcctcccaagtagctgggattacgtgtgtgcagcaccatgcccagctaatttttgtatttttcatagacacgggttctccctttgttgctcaggctggtcctgaactcctgggctcaagtgatcctcttgccttggccacccaaagttctgggattacaggcaccgcagccagctgactttaacgtttttaagaggagctttaggttcacagcaaaactgagcagaagattcagaacctcaagactagttttcaccaatgaaatgggaacagaagtgatggctgtgactcccaggccctgccctaaagtgccttgcaggtgttcctccaggcacattctctctttcagcttgctggggtggaaatgagcaggacaaacttggaagccatgcactgaggatgtaagtcagggctgctgtccacctaggtgaccgagtgaccaagtaaaggactattgctcctgttgccaatccaacataccacactgaatgcaatgaggtatctttgattgcatcctggaacagaaaaagcatgtaagtaggaaaaaaacacaactgattaaacctcaacaaaatctggtgttaacagtaacccacaaatgtgccatggcaatgtaagttgttactatttggtaaaactgaataaagagtagatggggactctctatattatcttcgtaacttttccatgaatctaaatttattccaaaagtaaatgtttattaagaataatttttaggcagggtgtggtggctcacacctgtaaccccagcactttgggaggccgaggcaggtggatcacctgatgtcaggagttcgagaccagcctggccaatatggtgaaaccccatctccactaaaaatacaaaaaattagccgggcatggtggcaggtgcctgtaatcccagctactcaagaggctgaggcaggagaatcacttgaacccaggaggtggaggctgcagtgaaccaagatggtgccaatgtacttccagcctgggcaacaagagtgaaactccatctcaaacaaaaaaaaataaaagagagagagagagagagaaaaaaaacgatttttaaaatagctgtattgagccattgtgcctttgggtctatttattactgcagccacgcctaccctaacaaatgcacttctcttcacctgtaaagctcctagtcacattttaagacttggctttgacattatctccattaagaagcttcctgtgattaccagggggtgaggtactgtacactttcttcctcgatcacacccaagagaagtaactcatagaactgcctatttcccaagccacattgaagtcttccttgagtcagaagccttgtctgcttcacagctacaacattcctcatggtgttcagaaatatttgtccaatgagttaatgccagcctcacctatttgttgtgaacattcactataccaaccagaataaaactgcttcattaactctgaagcactgcacagatgtaggggatgattaatcagttgcaaagtatttattgaacaacagacctgttttataattgtgatatattttcctggtggcctggagtgtatgcattgatacatggcacttggtctcatgattctgactgtcttaattagtattgatgaggcaaaatggcttaaatagtcaattcaatgccatctgttgaacacccaaagaccaaagacattataggtgtgggtttgcttttttttgctttttttttttttggagacggagtcttgctctgtcacccaggctggagtgcagtgacacgatcttggctcactgcaaccgccgcctcctgggttcaagcaattccctgcctcaggctcccgagtagctgggattacatgcacccaccaccatgcccggctaatttttgtatttttagtaaagacagtgtttcaccatcttgggcaagctggttttgaactcctgaccttgtgatctacctgcctctgcctcccaaagtgctgggattacaggcgtgagccaccgcgcccggctgagtttgcgtttcttgaatgcctactggctgccaggcaaacatgtgttgggggctttcactcctattatttcactgaatcccagtagtgaaatactccaacgttggtattattatcctccactttacaggtgagaaaattgaggagcagagagaacaagtgatgtgtttaccactgctcacttcgtaagtggagctaggtctccgaagtccacctataacctgcttcttttcaaaacagcatcttgacatatgattgatcgccaggctgtgctaagaactgtcataaaaataaattcaatttcttccatgcccctctgggttggctctcaaataaaagctgaatgccagaactcaaacaaacttccataaactgaagtccagttgttgaagctgggacttggggtcagaggtgaccctcctggcctacagagagctgtctgagctgctaaacccaggatgcttcaactgtcctggattcatctgggaataagaattatttcggctaggcacggtggctcatgcctgtaatcccagaactttgagaggctgaggtgggtggatcacgaggtcaggagttcaagaccagcctggccaatatggcaaaaccctgtctctattaaaaaatacaaaaactccccaggagtgatagcagatgtctgtagtcccagctacttgggaagctgagcagaagaatcgcttgaacccgggaggtggaggttgcagtgagccgagatcgtgccactgcactccagcctgggcgacagagcaagactccatctcaaaaaaaaaaaaaaaaaaaaaaaaaaaaaaaaaaatatatatatatatatatatatatatatataatttcaactttcatgccatgccagtactgctctaagtattttacacagcatagctcacccaacccttacaaccctaggaggagactactatgattccaatttcaaagatgataaaataggctcagaaatgttagtcaaaagttactgtgagtaaatacttcactatgaaattagatgctcaatgtctcctttcccaatagactgcaagccatttgagggcagggacagtcctgccttattcttcttcgtatctaaagtgtacatcacagagtcctgcacgcagtagctgcataataaataattgttgaataaaggcatgaaatgataaaagtcatacaaaatttggggagccacagaatctctggaaggcctgtaatgaatcaactaatgattgttgctatcacgtgaatatcagccaaatgcctgagtctgcaccctgtctataaactcactcctgcctgctcctctccaccagcctcaccctcaccagtccatgcactttctgagagcacccagggaggcagaactcctagatgccaaatgagaatgggttccattcagagctctctgcaccagagccatgctatgctccaggcagaaagaggcagagggctcttagcctgattctttcacacaagatcacttggccctcagttagcatgacttgtgttcaaggtctcaaaagttcccccaagaagacgtttatcatcatttagccacatttatgagctaaataaatgttcatttatttatttgtgtattcatgttgtatgtcactgatattttgtgctcggttccttacatagcaatagctgactattgcaaactactaagtctatgttacagaagaagacactgaagaccagaaggtttaagtaacttgcccaacattttatagaaagaatgaagctagtatataaatttaggtctgtctctaaagcagacaggcttctgctaccccacatggctccctctgtcctttggaaggacatccagtccttatacctggcaggacagccagtgtgtgtcgccagtgtgtgtcgtcagtgtctggggcatctctcccatctgtacctccttgacagtagcacaaaggtgacccttggacagatgctgtactgagtcaggatgtcacacctggaaacccgccgtgtccctgctgagtaactacccttcactccagagctctcctcggcacataaggatattcctcactttaatgtgtaaatgccattccaaatcagcaaccaaatccaccagccaggggagctccaggtgattaatgcatctctcaggtagtgaaaaccacttaatcttcagctgcaagtttctgactccaccaaacacagatctaatcgcccacaaatgcactgcctgatgggtctttattgcttaattaccaaggtgagaggctcataattaataagccatttactcctacatttagatgtctccagaaaatgtagccaaagattttccaaggaaattcacattatttgtcatctttatatctcttggtacctgaattggtcacctatctcattggtttctaaacttttctgcctacaactaaatatgagagggagagggaaaaaaagagacaggaagaggagagagaagatttcccctcttcctcctgactctatttttcatttataaagacccttgtgatacattgggcccacctgaataatccaagctaatcttcccatcacaagatctttaacttaattgctttaattaacttaattaacttaatctataaagtccttttttgcagtgtaaggcaacatattcacagattctggggattagaacacggacatagacattttttatcgggggtgggggtgggttattctgcccaccctaatgttcagcactgcaacaacctaagccccccacagaagaaaatggttaaataatctctccccacacattgcatgtgctgccattaaaatgcttataaagaactcttagaacatggcccatgctgatgctgtaatatttggtagaaagctgggcaaatttcaaaagtattacgctttgcataacaagtgtaaaaagcatgaacaatgatgaacaaataagatgacagggaaataataattcctatttattgtacttggtagttgaatcatgtacacttatttgtttctgtctgcatttttctaaataggaaagaaggatagagaagaggaagagagttgaagatgctgcattgctcgaggaagaggccatgagccaaggaatgcgtacagcttccagaagctggaaaaggcaaggaaatggattcgcctctagatactacagaatgcatcctgccaacacatcaattttagcccagtaggatgcatttcagacttctgatctccagaattgtaagataataaatttgtatgatttcaaaccactacgtttgtggtaatttgctacagcagcaagagaaaactaatccaagtgcccttgtgaatgaaactgttcacgtagttcagatttctattacaacagatctctagaagtggaattactggatcagaggatgtgactgttttgagagctcttgactagatgttgccaaactgctatccaagaaggctgaggggcaactttggtagatgatccaggaagaggaccccaacccccactgccccggggcagtcattcacttctttccatcttagtttcccacacccttgtccaagccatgccctcacctcccctggaaagaatgccccagccccttcactggtcttcccacttcgcctcttggcagccacagcttgtgtcccacatatcagccaggagaatctcattaacacctgagttagagcctggtgctctcctgtattcgtttgagctgttataaccacataccatagacagggtaatttattagcaacagaaattcattgctcacagttctggggactgggaagtccaagactgagactccagaatatatgatgtctggcgagggtctgttcctcatagatggtgactttatgcatgctcacagggcagaagaggccgggggctccctcaaacctcttttacatgggcactaatcccgttcatgggggtgggatcctcctgacataattgcttcctaaaggtcccacctcttaataccatcaccatggggtttaagtttcaagatatgaactttggggtggacacaaacgttcagaccatagcacatccttcattgttttcccattactctttgcataaagaaaactatccctgccctggcctctgctggccaccctctggcctcaccacccaccaagaaccctcaccccttaccttctctgctgtggccacatgggtcttcccccagcttccacccacaggccatgctctcatttactccagggccctggcacatgcctggaatgctctcctcacattcttgttggccccaacatctctcccttgtcctttcgagcccatataaaatgcacctttctcaggaaagcccccttcacctctcaggcaaggtccacttctcatgcattcccatactgtattcttctccttcatagcactcatcatgattacaattaattaactttttaattagttgtttagcttttaatcaaagtttggtatctatccaggaacttgcacatagcacaatctctatgaactttcacaaactgaacacacctgtgtaaacaccacctggagcaataaaacattctctgccttctcgggcatcccagaagctcacccatacctcttccagttactaagtcccctaaggcaatgcctaccttgacctctaacactagagataagtttttgtttttttttttttttaacatctaaacacaattgatagccttttttttttttggcatatatgtctccattaaaatataagctccataagagcaggacccatgtctgttttgtttgccatcctattcccaatgtccagcaccttagctcaacaaatatttgtcaaattacagaatgaattaattaacaactaattaatgttgtaggaattgggcaacaaggtgtaggaggtacagtgagcagggtgcccacaggaagatggaagtaagagaaacaaggtgcatctagccaaggaggggccagcaggaaggtcaaaggaatgcccctggctgcacaagcccagcctgcactgggcaaggcaagcaccctggccactaggggccttccacagtggcatgagtccaccccccacccacccaacctccaactccctgcccatgatggtctggataagatacccttcctccatagataggagcttttctggaaggacacaagctgttgagctccagagagggattgtccttggcaataaagagggggcattagacagtgttgtggtgagaataagctggcatctgttggtctcagactgggagaaattgtagcctgtagcccaagtttgaattgaaggacactgactgggtgactaccccatgatctaagttctgatttcaccagatcctgcttgcctccctactttccctccttccttccattcaaacttctgtccacacttatcagagcaggttctcctatgtgggggatgatacaaccccgttatcagcacagtggtctcaaaatggcaagacggaccctttctttctttctttttttttttttttttgagatggagtctcactctgtcacccaggctggagtgcagtggcgcaatctcagctcactgcatgctccgcccctccaggtttaagcacttctctgcctcagcctctggagtagctgggattacaggcccgtgccaccacgcccggttaattttttgtatttttagtagagacggggtttcaccatcttggccaggctggtcttgaactactgacctcgtgatccaccacctcggcctcccaaagtgctgggattacaggcgtgagccaccgcacccagcaagatagactctttctatgcttctgactgagggcagtttgggctcccaagttggagaagcattgagcctgcctatgtgggttgcagagccaggcagagcatttgacatttccggttggagggccatggcagccagtattttatttaaaacactcagagtttacagtcaaaaacccgtgagtctgaacaaattctttaactggcaattccctgcaaagggctctgcagtttgcactatttcaatcatgtgttcaatcaaaagggtattggagacgtaactgtacattatcactattgacatttcccagcctactccactttggttaaaaagaaagtgtccaaagatgccacttaataactttgggtatcatgaaaatgtcactttggcaagcagaaaagtggatttacacacccaccaaaggtgacctgcttagaaagagacagcagggattgtttcctggcctccaaaagagacagtgcacccaatgtccctgcaagttaccattgctccaggggatggagggagggagaggaagaacaaagggcagtggcagcccaggtgctactcagcccactggagcaggctcgggtggacagaaaggcttctagggcttcagcaacaaagctggggtgggggtaggggttgggcgaagaaaggtgatatggtttggctctgtgtccccactcaaatctcatctcgaatggtaatccccacatgtcgagggagggacctgttggaaggtgattgcataatgggggcagtttcccccttgctgttctcatgatagtgagttctcaagagatctgatgggtttataagtgtttggcagctcctcgtttgttctctctctctcctgccatcctgccatcatgccatcatgtaagacgtgccttgattccccttcatcttctgccatgattgtaagtttcctgaggcctccccagccatgcagaactgtgagtcaattaaacctcttttctttataaattaccctgtctctggtagtatgtttatagtagcgtgagaatggtctaatacacagggaaaaaggaccgactggtgcaaagctgataaaatgactgcatccggttctggagtcccagatgggggtaacacacacatagaaagacgcaggaaggtgggtcccagccaagagacccgtcccttggtcaaggtgatggggggcagcaagtgatcctgtggcccggtgaaagcaaggtcaaggttttggaaggaccgtcaagtgttagcagagctacagctggacagagaaggaagaagaggggccattttcccagaggagaaggctgtgaagagccagccaggcaaagtggcagggctcagttaaaaaccggtagaatggcaggctgaggcatggctgcaaagactgggttatccccttctccacttcctgggtttccatctcagcaacacgcaccaacctccacaatctaggtggcaacctcaaatctttctgtaacctcacttcccacagtgctttgcacctaacccaggggcagacaaatattttctgtaaaggaccagacagtaaacattttaggctttgcaggctctgtttattggaacattcaccctactcaactctaccgttgtagcgtgaatgttccgagaaaacttacaacactaggcagtgggccacatttgatgcatagaaaactgcttgccaacccctgatgtaacagattgccaaggcctgtcgatgttaccttctaaagatctcctgaacctgcccacttttctccagcgcccacaccctcgccacactagtccagccacaatcttctgttgcctagatgaccccagcagctccctccccgcctgcctcctccattctgctttcacttttgtctcctctacccagcagccagagtgagcatataaaatgcagttctgatcctgtcacctctctgcttaaaactcttcagaggttcaccatcgcttccagaaaaagatcaatactcctgacgtggcaacctgtcgagactcaggaccgctaggaaatcagctcttgtttacccctctatccattacactacgatccagctggggtaagtgcctgttggagcatctgcatgagttctccctcctgggcctttgtccctagataatctggcaggggcgcactttctctccattaacaattccacccttccctctcctcattttgactcatctcagtttaggcatcacttcctctgagcaatcctccctgatgtcatgaggcagtgctgagtgccttctctggaccctctgtttacttgcctgttaaatcctgaacatctggaagggagtcgtgttcagcaacatatctacgccttgcagcacggtgcctggcctgcagctggtgttccgtaaacagctgctgactgacgggatgcatcggtgagtcaatcaattaactctctctcacaataggaggatgaagctcagagaatatccaattggccatccttccccagaggccagaaaatgctgtggcttgagttccctggggctttgcctgccctggttgggatggctttctgccccagagttctctggaacttgcaagtctggagttttctgacccaggagttatctgtgtcagaaaaagaacctggctttcagaatcttctgtgtattataaggtggactaaggtttagaaagacacaaaggaactaatacgtttacacattttcctgggtaaaagcataagtaaattctcaatcatcttttctttagtatgattattcatttattaatttcttcacttatttattcattctacaagtgtcccctgagctcccaaggggtttctgcccctcaactagctgcttcatccacagagatggctggtacccaattcttgccttaccgtcagatgaggaagacagtccattttgatacagtgtggcaaatgctatcataaatgaatggtcagggacaatgtcagggagtaaaatgagggagagtaaaaatgacaataaagtacacaagaaagttcaggtcaagcagtattttagaaacaagtagacttaacaagctgaaaagaaaacaggccattaccaaggaagagtatatagaggcagttaaaaataaaagtagataggtcaggttaatgtcaacaatcgctataacagaacagtaaagaaacatcaggctctttacaaaattggatcacagaagcataatatggtttgcaaggaaatcaactagcattaaaaagattcactcccccaaaatggccatgcaggtgccagttttggccacacctctgcacaaggcggatgagcaaacctggtgggagggatacatcgcagaagccagcatgaaaggaccaccaggctgtgctgcaggctcttccaagggaggggctaaggggacacagacggagacccaggcatgcaggtttgagaacactggaaggagtgaaacctgttgtttctctcctgacctggatgcaacagagtaaataagatgatactgcagactggggatgtttagctcctctcttaatgaaactgcttcaaagaggtcgggggagtattcccttggcagtgattgtggttaaactgggctaacggtgactgcctagactgctttctccatctagttcggccaccacagagggtcagggctacccagactaccggccagggaggaaggagatcaacagcacggagatgtgtgtgtctcaaattaaaaatggtctggccagatgcaggcactggcatgctcagggagaagcagtctaaccaaacaagagaaaaaccttcagacctgagcaaggctgtgtgtgtgtgtgtgtgtgtgtgtgtgtgtacaggcatacccagtctaaccaaacaagagaaaaaccttcagacctgagcgaggctgtgtgtgtgtgtgtgtgtgtgtgtgtgtgtgtgtgtgtgtgtgtgtaggcatacccacatgtgtgtgaattcccattaggaggtgggacgctagcaaactggaaggcagagcccatctgaccctgagatcctcacactcatgcaaccttaatgccaagacaaactgaatggttgattgtgtcaactctcttgttttagggatgggaaaacaggcccagagtgggaaaaggagttacctcgagtcaaccaggagagtctacgagttgagattaggattgatccctggcctttctggaagcacactaaccagggattcactccttttgcttccaggacacactctattatttaatcctcatctcaatctcccagtgcagggtaaatggagaaaattatctccatgttaagagtataaaagctgaggctcagagacagtaagtatttttctgagggtcacagaactaatcatggtgcagatgtgattgcaatgaaggcctgtttaactccaaagcctttccactgtctcatgttgtctaatagatagccagcaaatgtttcaaacttaacatgtttgaaactgaactgctgatcttccccaataaacctgctccatcgacattcttccccatctcacttggcagcaatctcatccttccagttgcccaggcctagactcctctctttttctcacttccactaccaatccaccagcaaatctgttggctggatcttaaaatatatccagaatcaaaccatttcaaccagctctccctttgcagatgtcaccatctgccctatctcggatctgcaatcgcctcctacagtctattctcagctctgtagctggagtgatcttcttcttatgcaagcaactcatcttactctctgttcagaaccctgcaacagcttcccatttcatgcagagccaaagcctaagcccttacaatggcctttgagtcttgcaagttttttttttttgggggggggtcggtttttattatactttaagttttagggtacatgtgcacaatgtgcacgtttgttacatatgtatacatgtgccatgttggtgtgctgcacccattaactcgtcatttaacattaggtatatcttttaatgctatccctcccccctccccccaccccacaacaggccctggtgtgtgatgttccccttcctgtgtccatgtgttctcattgatcaattcccacctatgagtgagaatatgcggtgtttggttttttgtccttgtgagagtttgctgagaatgatggtttccagcttcatccatgtccctacaaaggacatgaactcatcattttttatgactgcatagtattccatggtgtatatgggccacattttcttaatccagtctatcattgttggacatttgggttggttccaagtctttgctattgtgaatagtgctgcaataaacatgcgtgtgcatgtgtctttatagcagcatgatttataatcctttgggtaaatacccagtaatggcatggctgggtcaaatggtatttccagttctagatccctgaggaatcaccacactgtcttccacaatggttgaactagtttacagtcccaccaacagtgaaaaagtgttcctatttctccacatcctctccagcacctgttgtttcctgactttttaatgatggccattctaactggtgtgagatggtatctcattgaggttttgatttgcatttctctgatggccagtgatgatgagcatttttttcatgtcttttggctgcaaaaatgtcttcttttaagaagtgtctgttcatatcgtttgcccacttgttgatggggttgtttgttttttcttgtaaatttgagttcattgtaaattctcgatattagccttttgtcagatgagtagattacaaaaattttctcccattctgtaggttgcctgttcactctgatggtagtttcttttgctatgcagaagctctttagtttaattagatcccatttctcaattttggcttttgttgccgttgcttttggtgttttagtcatgaagtccttgcccatgcctatgtcctgaatggtaatgcctaggttttctcctagggtttttatggctttaggtctaacatgtaagtctttaatccatcttgaattaatttttctattaggtgtaaggaagggatccagtttcagctttctacatatggctagccagttttcccagcaccatctattaaatagggaatcctttccccattgcttgtttttctcaggtttgtcaaagatcagatagttgtagatatatggcattattgctgaggtctctgttctgttccattggtctatatctctgttttggtaccagtaccatgctgttttggttactgtagccttgtagtatagtttgaagtcaggtagcgtgatgcctccagctttgttcttttggcttaggattgacttggtgatgcgggctcttttttggttccatatgaactttaaagtagttttttccaattctgtgaggaaagtcattggtagcttgatggggatggcattgaatctgtaaattaccttgggcagtatggccattttcacgatattgattcttcctatccatgagcatggaatgttcttccatttgtttgtatcctcttttatttcattgagcagtggtttgtagttctccttgaagaggtccttcacatcctttgtaagttggattcctaggtattttattctctttgaagcaattgtgaatgggaattcactcatgatttggctctctgtttgtctgttattgatgtataagaatgcttgggatttttgcccattgattttgtatcctgagactttgctgaagttgcttatcaactaaaggagattttgggctgagacgatggggttttctagatatacaatcatgtcatctgcaaacagggacaatttgacttcctcttttcctaattgaataccctttatttccttctcctgcctgattgccctggccagaacttccaacactatgttgaataggagtggtgagagagggcatccctgtcttgtgccgagtcttgcaagttcttgtctccaggtacattcctgacttactctcctcccattttctccttcacacactcagctctaggccccctagcttccttgctgttctttgaacattacaagcatgctcctgcctcagggcctttgcaatggctggccgtatactagaaagtcttccctcctcccttcttcctccacccttcatgatccacgcgactaaatctctctcatctctttcaagtctttgtcaatatatcacttcctcaatgaggcctactctttaaaattattaaccacttctactgcaagaatttccaatctgcattctctctgctgcgttttctcttactaccttttagcataccatgaactctactcatttattatgctaattggttattttctgtctcccacatgaaaatgtaagcaccatgacggaaacgatttgtttcttttgtttattggtgcatccaaacctagtaagcagctgacacatggcaggtgctcaatgaatatctattgaattgcactatctctctaattggtggctgcataaaaaaaaaaaaaaaaggcttaaactcacaggagaggaaatttttctaagtcacaaagtcatttttttaaacattactccatccctaagtcttccacagaaggagctgaatgtgtaattttgacaaatgagtttgcatagagaaggaaataaaacatggaatgagactatgaaaggagttcttgggaagagaaaattgcattgcctttaagtaggaaaaggaaagtaatatttaaaagcaaagatgtttaaaacatcgcaattgtaggtagaaataactcagaggttgaagggggagggtgctgcaagatgcagtggaattctttcttatctgggctcctgcctaaagcattactgggcaattgacaggccaaatcaataagcaacttaaattctggtctaaaggaataactgaaatgaatgcacaacagcacagggaaacaaatcggcacttggaacaaaaaaggggctggaatgctggctttgactggcttgttcaccccagtgaaaccagcactccaggttacttgctaagtgctgtgatgattataataatggtggctttgtggggagagtgtcagcgcagccctctttccctcctgggtcccagtagatggatctgaatctggtctgttctgtggagagaagagaggagggaagcacctgtcttggtcttgtctgcaggctccctttcctggggtgtgaaggagctcctgcaggcttggtgtggagggctggtcccaaaggcaaggcctggggtggaggcccctggggagaagagaatgaacctcaaactcagggttggccagacgaagctctgaggctagaggtggaatcacaggctggaacacactgtccagaattcagatggacagagacaggatcacagcaggtcaccaacgaactggaaaaatccaagccacctgggctgccacctatagttgtgcacaaaaccacaggtcaagggggtgagtccgcctgaaattaaattagcctaggggccactatccctcacgtgggttgagccagttcagagggagggacatctttttgcaatctgttcacaaaaagaggttaccttttcaaaatttgcacagagactccccaaactctggcaactgtggttatctgtgatcaccctttagtggtttgttttgtagagtcaggcatgctctggtcaagagaagctgcaggaactggaagaaattaactctgatcttctcagagctcgcccaaaaaactggacctatagagaaacctatggaacatttcaggcttccttttcccaatccaaatttgagctacagatttgagccccaaattaatccccaaatggttctcctactgattcgttcatttcgttcatccaggtattcacagggttactaagaagtgcttgtcctcggtcaggccaggaaagagagatgacagacttggtcccatcggcaaactctttacagacaaaaaatccacctcactcatctctacagctccagggctcagcacaggggctggcacatgaaggctccctttccttaccttttcctggcacatgcaaatatatgttttttgagtatataaatcaatgaatgatgagaatatcttgcaactccttcaaaccgacaggtccacagagatgatcttgctcctgaccttgacaacagaaatacattcttagagactctgtagtcctaaatagaactttggggaatccttttaaaaatcaaacgcatacttggtaggagaactgacaatggcaaccagttgctcagagttatttgctcaaaggcctacctgcctcctaagcctcactgttcttcattaactgtcaggggttaaactttcaagagctactcccaaaagagctgcaggaaaattctgtctaaacagccatgcaaaagtgtctggggatcactacggacagaggatgatgacagagggcccatgacattgggccttgtcatggctgaacactgaccttccactgtcatggctgaacactgaccttccagtgcctacagcttttaaaaagagtaaaaactatgttcatgggtacacaaatacaaacatgcactcccccacacacacacatacatggacacacacagaggcatatcatgcattatcttctctcattcatcgatattctcaaatggcttattacacagatttacattcacaaatattctattatgtaaatgtaaatctattctattatgtgaatgtaaacctatataatatatttagccattttctcagttggatattttggttatttctatgttgtcacaattttaaatcacattgaaataaactaggcccctttgactcctttctttctctcttactccatgtggtagactaaatgtggctgctaagtttatttctcccactatgtcttccagccaattctagatttgagtcaattctagagaccaccatggtggagagtgcatatgcaggcacgccagttaactgatctggctgagcccagccctccagccatccctgccaaggtgtcaatgtgagtgaaaccatcttgaactctgcatattaacttattctccagctgaatatcaccaagagacctgtcttctgatgctacatggagtggaacaatctcccagctgagctctgtccacattcctgaccacaaaatcatgagatattaaataaaatggctgttgttttaagcatcaaccagtcttctcaatgctgccacaatcctcacaatggcccataaatctctacgtgatctcccactattctctttgatctcatctttggccttcccatggctgaacctgctccagccccactggcctccctgttcctccctgaacataccaaacatggtcctcccacctcacggcatttgcacttcctttcccctctgtgaggataatcctcccccagatgtcagcacggcatggtccctggcttcatgcaggcctttgcatacatttcagtcaatcagagaggtcttctctgatatcttacctaaaacaggagtccttttcttccacctcagccctctggagagccagggaacacctctctctccttatcatgctttatttttcttcataccactttcacaatattaatatttatatgtttattgtctatttagacctcctctcctccccacaaataaatgcacattctttagtacgaattctccgcaaacagaaacgttgtctgcttttatcattgctgtattcccaggacctaaaacagtgtcctgggtgtaggactgatcaataaatatttgtaaatgaatgaatgaattaattagcacacgttcttggatagaaatctctctattcatttctaattattcctcaaaataagttcctatgagttaagttgtggaggtgtaggaataacacatttcaaaatcttttagcacatattggctaaaattccctacagacaggctgcactggtgcttacccatcctgctagggatgtgtaagagtgctaatttccttgcatcatcaccaatataggataaagtcactcaaaaatatttgctacgtggatacatggaaaaaaatggttaccctttattttaacttaactttcttgatcctgtgtgaactgaactccttgttccacgtgcttattggccactacaaagtaagttccttgacagcaggggtttagatttgctcactgctatcccagcatcccagatagagtctaggatataagagatacatgataaatatttgtagaaagaatgaattaatatagatgttttcttttgttattgaaaggctattgactcatgtgtcctctgagaagtctgtctcttttttcttactgacttgaaataactccatgcatatagaatattttactgtcatctaggttgaatttttaatgtgtcatttgcactctattttgtatatgctattttttgacattcagaaattctagcattttatgtagttacatctatcattttattttagttcctctatttggtaccatgtttagctacagtcataatagttaacactgtatagcacttcccacatgccaggcacttttctgaggattttacatacattgtttattaaattcctacagcaatcctataaggtagacactatcattatctaatcatataaagaaactgaggcaatgagctatgaaatcaatcatctcctgtacaagattttatataaatttacctgtagattgctttatgatttcagtttttatatttgtgattattatgtaataatagaaatctattgggttactccatggagaagtgagggtctaattattttttcccaattaattgtcaagtgctccaacacagtttattgtaacaatatgtaacatgtctgtaacatattgacatatatatatgtatgaatagacatatgtatacatacatacaaacatatgtacatgaacacaatcacacactatatagcatttgctggtattcttactcagctcacttgtactgtcggtcctttttagttgtttagtaatttttgtggtgtgttcagtgaatcaaatttataaaatagaaatataaagaagaaacataaaaggattaccagcgattccctacaaatcctgattaaaggcacgttcaatgttgttctcatgaaatatgcacctgtcaaataaaaacataagcgcctccaaattgcattataaatgcacaatactttttggaaacagtttgcttcagaactttggcagccacaataataacacacacaagcctgtttcaccccaaaggaaatatctacaatacaaggatgtttagctccatcatttttcactgctttgggtttcttgcaaaaccattttgatttcagttgaaactaatgacagcaagcagtttatggtcaggttcacaaagtacatttctacccctgctgtggggaagggatcacaagaaaatagcttccagtaggttacgactcatctagctcccaaagtggggactcctccaccagagcctgcattttccactttttgccacactcagagaaggacttcgacctcaacatgtgatccagataaagagcatcctcctacacaacctcaaggtaataataacattttattggtatcttgtacatccgttggcattggcatttatatttttattcctatatcttcttatgtcaaagagagcatgctatacatcctgttcccaccttgcttttctcttaatgatttatttgaaaatggtttgtcattcatttctacagctgaataatagtttgctggatggctataccccatgtatataacccgagacagggtgaccttttgtggcccactgcctggcacttggcttggtctaacaaacagaaccttcatgcaccaagctggtcatgccaccaagtcagcgcagtcattgggagtgagtggtatgtgagtcctggctccctgaatgccctgatggaccccatggtccagccacactggctgggtccctgtaagcttagcctaccttgcctgagagccaaggaaatcccatcttctgcctcaccatcctcaaccacatttcagcaccaatgcaagatccagtacagctgctggaatccttgtttcatccagggtggacatggcagaggagtcagcaaccattttgtgccccagtgttcttcagataagttcccactcatgacaaactctagcccatactgcaactgaggtcccaaacatgcaattgcattgtttcccacggtgggctgggtcacttgctactgcaacaaggcagaggaaggacagcatcccagcatttacagacacattgcccagcatggggtctggctctgccagaatccaccgaaaggtatgagccctttatgaactagctgcactctgccctttggtcataagataaactcatatcttgacccaaggcagagccctgacatcagcatcagatcaaacttttgtctcaccacagagcaagccctgaccctggtcagactcaactctgacccttgcacggcctgagccctgacttgggccacggactgcaacccgaccctcagactcacgctgagtcatgacccagatcacagacacagctccaagccccagacttatcctgagccctaaccctgggcccagactcagccctcaccttggctgtgactgagcccagctggctatcttcaaatgcggtcacacaggaggtacttggcacagtaggcagatggctctgtgtgagccctgcctcggctctggatggtgcttatgatctactgcctatcacgagcatctagtatcttgccatggggaagaaatctcagtcccacagacctgagttcaaattctgccactgtttagctgggtgactttgggcaaattacttctagtccatcaaattagatgccttctgaagaaaccatttataaaatgggcacaaaatacctgctgtcatgatggtcatgattaaattatatgattgtaaagtacccagctcacagtagatagagttcatccctttccccagtaggcatcttgtcagctgcagctgaattattggtataggaacaagccctccagagctgtgctgtcctatactgtggccaccaaccatatggggctattttaaacaattgaaatgtggctggtacagccgggcacagtggctcatgcctgtaatcccagcactgtgggaggctaaggtgggtggatcacttgaggttaggagcttaagaccagtctggtcaacacggtgaaatgccgtctctactaaaaatacaaaaattagccaggcgtggtggtgcacgccagtaatcccagctactcaggaggctgaggcaggagaatcacctgaacctgggaggtgaaggttgcagtcagctgagactgttttgtgccactatacccagcctgggcaacagagccaaactgtccccaaaaaaaaagcaaataaatcaaccaaccagaaaaatgaaatgtggctggtgcaaactgagctctgctataaggaacacaccatatttcaaagacaaaaaaattcagaataagaaaaagaatgtaaaatgtatcattaataagtttttaatgattatgcatttaaataatatttgaaatatattagatcaaataaaatatactactagaattaattgcacctggttcctatttttaaaaatatagctactagaaaattttaaattacatatatggtttgcaggtccagaggtctgggaagagcagttcatgggtaataaagacagttaaaacagaaacaagagcaacagtaaaattaatacctaactaagtgtttattgtgtgctgggcacggcactaaacacttaagtcctcacagcaacctctgaaggtaggccctactactgtccccattattgagatggcacaactgaggcaccaagacgtaaagttatatggtccaaggtaaagagccagtaaaaggcagaaataggatttgagtccacaacacctggatccagaacctatgtcctagaggaaatgacacattcattaaaggctgcctcagtaaagtgcttcctacaaatgagtcacccacagggaagaaacatgccctggatcaattaaatgctgtcattgagacatgggcagcagcgaaccccactctccaagctcttacctacccacattgctaggcacttcactgcccatcagactggttggcactcaacagggtctttatggaggtgggggagttctctcatttaatcttgtgcatttctcagacatatgccaagttatctttatctggagaatcaaagaggacagctccttcaaacctttttagctttctccattagcaagaggtacctctgagagcaaaaatgataaactcaattgttcaaaaagcaagttccgttcttcaatttgtgtgccagtcataaacacagcaacttccatttgagcagaaatcccacatttcagcagaaatacttaatgtgtcatttctcctgcatccatcttcttcaaagcacttactttagaaagtagagaaggaaaaacaaactctaataacctgtactttgaatgggagatgggaactttatgataaagaactcaaaatgctttattgacatggctgcacacatcccccttcagctcctgaaactgctcctgagatgagaaaactttcctaggagccttgcaactcgacttcacacccagctaggctctgggggtaggatgcacactcactccagctcctgatctgttttgatcagccagaagtcctagttcaagtctaaacccagaatataaccatcttttttatcttaaatcatgcatttacaaatatctggcaaatacatattgagcactgtggcagattatattttccaaagatggtcatgaccacgccacttatcccacaagttcttacaatgtgatcttgtcactccccaccaggaggtggagtttatgtcccctcctctgggacctgcgtggacctttgtgatgggctggaccaatggagtatggagaacaggcttctatgtgacttctgaagctaaacataaaagttacaacaagtcatgaaagagaaaagcttttgctcttggagcccagccactatgctgggaggaagcccaagccacatgaagaggtcagagataggtgttccagctaacagccccagttgaggcccccaggtggcagccagcattaacctccagacttgtgagtgaggagtctggcttatatataactccagctctagccactgtcttatgcaaccacaggaaggagcccccaaatgaagccacctacctgagctagttatggttcatcaaaaaaataagacataatgaaaaatacattactgtcttatgccactaaggttctggtgacttagcatgcagcaatagataactggagcaagcacctactatgtgccaggcattgtgcaatctgctttaacaacagttgaagcagactttgtccctgaccttaaggagaccatagcttagtggggacataaaaaagtaaccaatcacaagcctgcactgtatgaacaggtgacagaggggcatgcaagatactttgggaacaaaccaggcttcgggaatgtaacaaggcctgaggacatcagggaagcatcctcagaggagaagattgtttaattgagtcttcagaaggagtcagtgtcaattagatgaaggaaaacagagcttttcattcattctaaggaattttgggaaaataatgtagcaaaaatagatagaaaaaactatgagaaagcctgctcacttaaaaacatattataaaacctcaataatcaatacattaataattaaaacctcgataattgattggcttattgacagaccatttgactaatgaaacatcaaaaagtgcagaaatagatctaaatgttacagagatttagcgtgtgtgtgtgtgtgtgtgtgtgtgtgtgtgtgtgtgtgtgtgtgtgtaatggggcattccaaagagggacttttccagaaatgcattgtactgcatgctatatacaccaagataatatccaaatgggtcaagattttaaatgcaaaaagaaatcccaatccactgaaattttagaagaaaatacagaaaaatagaattttagaaagaaaataattttgtataactttggaagtatctaaagtcttttttaaatcaaaatccagaaatattaagggaaagattgataaatttgactacatgataaaaaaaaattgtgtaatgccaaaagaaaaagagagggaaagagaagccttaagctaagtctaaaaacaaagacttctatgaaggttgaagataggtacaatgtcaacctgaaaaactgcagcttctccttagcaatcctaagatatctatagcttcttgaacctcttacagagggcctgaaacagagtagatgtttaataagatatattgcatgatcctgttacagaaactctcactaagatggaagttctggtttaatcttgactcagttatgtgacctggaacataaatgggtatgtgcacacacatgtgttccatgcactggggggaagtagagcaggtgattgcttccctactgccctaccacctcattcctggaaaaaacacatcaccactttcaaggtaatacattgacgcagtgatcaagactgccaggcaaggccacagaggcagcattaaagcaagcccaagaatcaggcattgttctatggatctcactgttcccctaacctgaggctcacttcttcaaaagtcaggatctggctgcatcttgctgaacctcaattttcccatcagtacagtaaaatgggcacaatgaccatggcttcagaaaccagttgagcatttaaatgagaataatgtatataagagaccgagcactggtggaggatatagcacaaacttcgttcttagtctctgtggccaccagagtcattatggtcatggtcagtttgctggagattcttttttttttttttttttttttgacatggagtctcactctgttgcccaggctggagtgcagtggcacgatctcagctcactgcaagctctgcctcctgggttcacgccattctcctgcctcagcctcccgagtagctgggactacaggcacccacaaccacacccagctaatttttttttttttttgagacgggtttcaccgtgttagccaggatgttctcgatctcctgacctcgtgatcctcccgcctcagcctcccaaagtgctgggattacaggcatgagccaccgcacccagctttgctggagattctattacgataaatatgtaggccaggcgccgactggataaataggcaacctccacttgtgcttctctgtctggaggagtttcttgcctttaaggtacattgcatagatgaacagaacacattaccaaagatgcacaggaacaaaatgaaagcatcaagaacaccctgacctgctactcaggatactgggccataggccccactctcatgatttcaggctgagagataaggagctgttaaagctggggttttgtttctcattcctccctaaacacagtgaagcttgggaggcattaaatggatcaagcatttttcagaacaaggtagagaaaaaaagacgtggaggtatgtcatgcttagaaaacacaaggctagcccctctgaaggtgctgaccgactccctggagtttactatttgtgtagaccttacaaagctcaagtttggggtgtctgcctgtcagtttctgcttcctggtttccatcatgaggcctctgaggactccacctaaccatgttatccagtccctgccactttaaatcaaggatctgaaaggcagcctctccatttagctgacaggagaggcagctttcaagagtcttctgtatcctttgtcagtgaaagtcacatgggggaataacccaaacttttcttccctttccagtgtagtgaaatggtaagtttcaagcatatgaaaaactcagccattggaacatcatggggtcgattaagccagtaatgactcaaaccaaagagctggggaatcttccgactaagtaatagggtagtgaatgcacagaaaggcagaggcaaaaaccgaattgtagcatctagttcatgagcctttgcatgactttggtctcaacaccggcacagtaatcatcatggaatctcagaatcactggaggagcaggatcccccaaaacccatctctgtgatcgctattggatgccaaaatcctccgcacatcttcatctagtggtcacccagcctctgatagcctccaggcttgaaactctactctgaaatattaagaagggaagctgtgttcaccactcagacacccactcctatttcacctccctgaagaaaccttccctgtctgccctctcagtcactctctaataccttgtctgactttgccttcttaatagatgtgttaggtgctgacccaggcatggaggttctgactgtgatgtcatgtagcttacttattgccatttagactgagctggcgagctcatttatctaatctgttaaaaccagatttggtggaaagtgaggacctcaatatttccacatttgctgacaaccttaaactctcatcgaagagtgggaagttgttgcttggaatcacattaagattaataatgacaatagagataatgacaactgcaaatatagcaactctcccactcacaatggcagtcccgattgcacaaagaatccagtaccaggaagggacacattttaagctatcttggaactgtttcctaatctgtgggataaagatagatcaaacaccactttgcattttttaaaccttgaataaataggtaaatagcccctttgttaagtaggagaaaatattgggaggagacgagtttaggcttctcaatatgtttccatctcattggccagcaggtctatggttcagagagaggttgaagctggagacagggatttcagaattatctgtagagtctcttggttgaggccttgggaattaatgaaattgcagtaccagagagtaccggaggagaagggaagtggggagctgtcctagagaacaagctagaatagaaacagtcaagacagccaaagcaggagtatccggagaccaacgtgaagggaaagaagtgagagacatgtggaagaggtggcaactcctgccaaaggggattaagaacaaggagttctaagaactttctgcagggctgttggttggagacgctgcctccatgcaaatctcatttgccgctgtcaatccagatcctgtcccaccacgaccatttctgagaaacagactcaagacatgaaaaaaaaccctctttctgtaaaattggttcgtgaaacagactacaggcattaatatcctttatgagtgacaatttagggccaatatttacactttgtaatgttcgttctctttctctcgggacagaaaagaatgttgccaatatcaatgaataaacattaataaaatcaaatataatcttgttccatctggaatcaacctttaaaaaaattcttaacatctgtatataatatacatacacctctatgtacaatagggaaatcagattttgcctgagagatgtgcacagtatttaatgccaatttatttggttccaccttttctccagactgctttagaagggtagcgtccctagaattgagattctgaattagtttcctctgactctcaggtacagaatgtccagctcaagccaagacatatcaaatatttatccactcccagattttcaaaaatccagctttctgtctcctcctgcagctgacctcctctggcagaaattcagcctcaaactgggagaaatgagtggatcaccagaatcaaagctgacgtcagtggtactgtgggttggtgtatgacgtgggaaccctgacaaacagaaatgaatgtttataaatgttagatctcaggtctgcaaggaaagatcttgctgtacttcacaaatggacttgctttttaatatgtctcctgtttcaggacaagtaatgttggtcagaactctgggggtgaacctaggggctcgtaccacttggggctgcgttgtcactcctgtcctcagcatcgcagaggccaaactgtacccagatgagaccccagggaaagagaaaagaatcttgggcacgggggtcattattcaaagaacctggtgtagtgcgtgggagatactgcatgcacctctaactcagacatatcattaattcacaccatccctcttgtgcctactaaaccaggatttctcagcctcaccaccattgacattttgggccagaaaattcttttcttgtggaactgctcagtgcactgtaggatgtttagaagcatccctggcctctacccagaagatgccagtagtactgtcccggttgtgacaagcagaaatgggtccagatacggtcaaatgtcctctggtgagagggtagcaaaatggcccctggttaagaactactgcagtgaattattcaagggaccatgagtgaagttttgaataatccacacctgagctaagtggtgccagagagatacttgcaggacctcagctttgttagtctgacatctctcctataagcccaccgactggagaccccaagcatgctgcagcccctacctaacagatcttcatttattccattacaggctgtgggcagcatttcttcatttcagatagaatcttccagagtttaggaacagagcaggctgccttctctcctcttgccaggaatttcagtgcgacattgaacatgtcactggagtttgcttgttgcaaggacaaacacttctcctggcacctcacccccacacctgcctagagacaaggctgcccaggctgtttaaagggaaatcagtactgtgccaggcctgtccaagtgaattttttctttgagcaaatacccctgcctacttgttcatttttaaaaccataggtcttcctggtgagggggcttcaaataaactacaacaaagagtaaagtctttatcccttagtaggaagagaagaagagcctccaacaataatttattcattcatccactggtaataaaggcagggctgtgatcacaagagaggagatacagacttcttggtctcaggggatttgcaaggcccagagtgtccagtggtatagatctatcaaggagaagcttccttggtaaacttagtgcctactgatccaggaaggaatatgtgctgctcacttcatccctctgtctccatgtcccacctggtaaaaatcagtcctgacaataccaaaactttgccaattctacttctgaaatatctcctggctcagatccctccatctttgcagttcctaacgtattaatagttcaggtatcatcttcgtttgttcctctgaactaatgtaattgctttctcatgcctttccttcccacttccatacggaataccacggcggtctttgtaaaacccaacagaatgagaaaacgctcatatccctcctcaccaaataccataaacaatgtttgaaaataaaaacaaaattgtcacgtggaagaaacaaaaacacttgcaatgtttgtaacagaaaacctaatatctatatttctgactctctcctggcttccacatatgtgaagaactctcacaaatcagtaagaaaatgccaaaaataggcaaaggccatgattaagcaaataccaaaaatgaatttttaaaacgaaaaatacaaatatgagaaatgtgcaaccttacttctaattgagggccacaaattaaacaagtatattttaacctcttagattagcaaaaatgtaagaggttggcaacagcaggtgttgacaaaaattcacaaaaatgggagctctcataatggttggaagtgtaaattggtgtataatttatcaaaggcaattttcctacattgtgtttgttttctactgctacataacaaataactataaatttagtggcttaaaacaacacacattcattttctcacagttttagtgggtcaggagtccaggcagaacttaactgggttctccgctcaaggtcccacaaagctgcaatggaggtgtcagccagggcttagatctcatcttaggctgagtcttcttccaagcgcacataattattggcaaaattcatttccttgcagctgcagactttttgaggcttgcttcttccaggctagcaggaaagagggtctctgacttccagactcttttaaaatgtctcagttgattaggtcaggaccactcaaaattaactctgttgattaaagtcatctgattagaaaccttagttttatcccaaaatcccctcacttttaccatatattgaaacatattcacaggattgacacccattgcctttgccatattctatggcgatatggtttggatctgtgtccccgcccaaatctcatgtttacttgtaatcccaatgttggaagcagacccagtgggaggtgactggatcatggaggcagagttctcatgaatggtttaacatcatcttcccttggtactgcatagtgagtgagttctcacaagacctgattgtttagaagtgtctagcacctcctccaacctctctttctcctgctctggccatgtaagatttgcatgcttccccttaattccgccataattttaagtttcctgagatctcctcagaagccagactgatgctgccatgcttcctgtacagcctgtggaacagtgaggcaatcgaacctcttttctttataaattacccagtctcaggtatttctttatagcagggtgagaacagagtaatgcatatgggttagaagcaagtcacaagttccacccatgcccaaagggaggggattaaagaaagacacagatcatcagagatcatcttataattctgccaacagcatatatagaccaaaacttaaaatgtttacaatctttgccatagtaatctcacttgtaggactatatcccaaagaattaagtggactagaacatatatatgcccacagaagccttttcatcattctgctatttgaaatcatgaatatatatactatagtagcaaccccaatatccataaaaatgagttcaaataatttatgatatatgcacatggcctatcgtatagctgttaaaaaaaaacacaagtgatcaaaaggtatttaagtaaaaagagtgctatgatgtattaagaggaaatagcaagtttaagtccatctacacttatatttatatataactgtgaaaatgaacctaaaattgtaaaataacatacagctattagcagacagtatcttcaggtatgggaatagatggcaatctttattttctgtgtagtttttatggtgtgaaactttttgaaatagctgtgtattccttttataacaagacacaacaaaagagctgttttttaaatgcgagagtattggtttgtaaaatgagtagtgtacaaaatagtatactcaagggcatcttatgttttgtaaaatatagatgagaagaagaaaacttgttagggaagacacaaaattttaatagaggctagatagacgttggtattatgggatgtcttgaggttctattttagctgttttctgcatttttccaatacaacatgtacattattttcatagtttttcaaaccaattcctgctatcttttttttaagtgtagaaaaggaaccatacatagggaaaaaaaaaatagccaaatgcagtctcacttccctggtctccaggcagagatggcctccaacatctgagcactcactgaccacagcttcctcccatggcttaacagtgccttctattgtggctgcctcgcccatcaggctgtaagggtactgatggcagcacccctcgttcacctctgcacctccagtgcctgtcacagggcctgccacagagtacttcacggcggctaaataaacgaatgaagaagatactggcaggctagaaccttgtaagcaaatcaaagtgttccaacaatcatcttatttgcaatggtgaaggatggagttgagggagcaaactggaggcagggagacaagatgccctggtttattaggagtaagatattgaggacctggtggcaagggagcagcagtgcagatgcaccggaagtggaaaggacagaattcagggaataatgggagtaagtgtccacagcagccaagcattgagggtaatgcccatactctggcttggacaactgggtggtgacatttgcctgaatatggagcaaaagcttttgagagagaaaacatgacaacttcaggtttgaacacacagggtttgatgagcagagacatctgggaggtgccacaaggagctccttatgtcatcctcccagctgtcaccacacacagggttgattctgcaaaccaccggagcttaattgatgcatgtcttctgagtaaaattcatctatccctcctcagggatgaaatgccccctgccttaggattctgtgacttcctcaagcccagagagatggggtgcaatgggagggttgagttacagtgtcaggcactgcataggctaaggagctccagggtctgctactctgctatctgggaagatgctcatttgcattggttccctctgcagtgggatgattttgtccttcatttgccttccctggatgatgcaggctgcctgcatccccactctgaaaactctttacacagaactggccgcacatttcataaagccatgagtgatgtcaaagagcatgtacaatggggagaagactgactctgggcattaattttacatttgtaatcaggggatcttaatcaaatgccaccaagctaccattgcaagacagccttccacaaacaccaccccttgcacagctcaggttctgcctggcactcaaattatctgcaaaatggtccctaccaccgtgcccacttatgccccaggcctctccatggagccacatccagtttcctaagcttactacatcactctttgtgttgtcctctcagccttgattgcccttccagatgtaacctaactagttcagccctctgcagccttcaaaacctagctcagtcatcatctgtcctgggggatctttcatttttattttttaaaattttacttattttggtttttgttgttgttgttatttttttgttttgttttgttttgagatggagtctcactctgtcacccccactggagttcagtggcactatctcaactcactgtaacctctgcctctcaggttcatgcaattccctttcctcagcctcctgaatagctgggactacaggtgtgcgccataaagtctggctaatttttgtatttttagtagagacggggtttcaccgcgttggcgaagctggtcttgaactcctgacttcaagtgatctgcctgcattggcctcccaaagtgctgggattacaggtgtgagctaccacacctggctgggattttttattattattattttttacatttttaattttatagatttaaaggtacaattgtagttgtgttaaatggatatattgtacagtagtgaagttggcttttagcgtccatatcaccggatagtgtacattgcgccgataggtagtatttcatctctgaccctgctcccaccctcctaccttttagggtttccaatgtctcttattccactctgtacgcctgtgtgaacccgttatttagctaccagttataagtgagagcatttttgactttatgtgcctgagtcatttcatttaaaacaattgcctccagttccaaccatgttgttgcaaaatacatacttttattcttttatggccgaatagagttccatggtatatatgcaacacattttctttatccagtcctctgttaacggacactaaggttggtttcatgattttgctattgtgaataataccacaaggaatatgtgagtacacctcctggcaatcttcaacccctttctaacagggtgggtttggatccctctgtcctgagtcaatgtcaaggcactgcattgaacctttctgtttatgattctgcatctctcacactactctgagttcgtaggttgctgtgccttgtctcagtaccatgctcagctccatccccacatctaccatgttatgtactagtgagtggtagctcccgcctgatagaatgagctactctccatagtggaaaattctttcccattgattccaaacagtgcaaaagaccccctttcagaatgaaatttgagggtcacctttggctcttctctgctgcatctccaacatacaatctgccttctacctgcaccatcacccctttcattttcccattatattattccagtggatgcaagtgattgcaaattaccatctcacccgtcacaaaagcattatctacaaatcgctttgtaggccatcaagcatcagcacatgtcacgattatctgggtgctcataaaatccttgtgagatttgaaggccagaaaccatcttccacattttacacacaagaaacatgaggctcagtaaattaatctagtcagatacaaagtttagactgcaaatcaagacttgtaattctcagacttggtctttttacatgttacctccattaaatagtctactataagagttcgttagggatggtttactctacaagaaaaggatccttttgtttttctccagtgcctagtttgggacgcagcacaacaaatcaataaatcaataaatcattactaaattaatgaatacatctcaataaatcattactaaattaatgaataaataaatgtccctttgcatcatgaccttagttttctcatctgtaaacgagcatgtttaggtgtgctggttcccaagaacatctctggcactcttttgtctctagctatcaatttctggctagcagactgactgtcaggcggaggtctgtgccgggcaggatgcaggcatggtgaacaccaggtgccctgggtgtgaataacaagcaacaaaaactgaactgagaccatttatgaaaataataatgaaaccacacattccttgataccagaaataatacagggctccatgccttgttaccggctctgcttctcaatgtctttgccatcccaatgtcgttcattcccactttgcctgaagtccatttttggtacagaaatgtaatttagtgggtggcttttcccacaactctgggccactaacacattcattttcttctctgcttttaaagtttatgttcctttgtgcacaacaggcagcacatcaccactttcctgcaaagtcacaggcaacagagaaactcctaaaagctcctgcaagtcttgggagagactggagcatttccattaagaccctcatgctactagattgttcttaggaacccctcagaagattcagcaacatgcaaagtgacttgtagaatgggataataatcataagggtaataaacgcctatttgatagtgcttactttctgccggacactggtcaaacggctttctatatatcctttcatttaactctcctgacaactctgtgagggaaatgctgtcaatatctctatgtttcagaggggagatctgaggcatagtgacattaggacactctacaggtcacattattaggaatgggcaaagccaagcttggaacccaggcagcatgattccagagcaaatactcttaccactatgttctttttttctcctatagctacatatgctcctctttcatgaagccttcctggccaccccacaaacaatgctaaatactagatggtgacagaacaaggagcaggggcttcacagtcagttagaactgatttccacccctggctgtgccaaattacttatatgattgtgggcaaattgaataacctctttaaatcttaacttcctcatttgtaaaatggaaatgataaacatttcacagtaccttggcaaacacttaagacttaagagtcagtaaatgtcctgcatgctctgaaatgggaagtcccaaggcagaacagaggggtgctctgttcccttcactcctcattcatttattcatttattcacttacccaacaattctttaatgagcaccaaccacataccgtgcattgcctggggtcctgggaaggttcctgttctcacggagcttacagtctagtgatgagtgacagaagttaaaaggcaaatacaccaatggcacacacaatttcagagacaatcagcgcaagaagacaataaacaggagatacgagtgatgtagtaatggtatgctggggaggagggtgtgagggagagaactgctttagactggcctgggagatatttgagccgagactaaaatgagcaaatgagcagcatcagccagccaagtgaagatccagggggctaggggtggggtggagaggggacaaacgatttagacaaaggaaatgacaagtgcaaaacgcaaacaggcaaaaaacttagagggttctaggaaaccaaataaggccagtacggctggagcatagtgcatggccaggagaatagaaggagatgagctttgagaggctggtgcgactagatcttgctgggccttgtgggccatataaacaaggagttcggatttcattgtaagtgcaataggaagctcttagggcattttaagtagggaactggcatgatgtgatttatgttttcagaagctcaatctcgataagaagtgaagaatggataaaaggagtggaatacatttagaagtggaacctggagattgtgataaatgttagacctcaaagcttcactccatagacggacaagaatgacatttcttctttatccccgtagatgtgtttcccaagacatccaggagaggatattggcgcaaacagtgagtcatcactctccacccaccttccagactccctcctccatgcatatccagctcttctcaacctggggctcccttagaaaatccagacaaaacaattgccacagagccaacatcttccttttccctttgtcttatggtaaaaacatatttgtagaagcaaatccaataataaaagattagcacataaatacactgaaaagtaagatcactgacaaatacaccaagtgtcggcaaacagttctcagtgtcttggcacatgcggagcccatgttgcaggtggcatcaggcagacatggggcctaatcagaactcccactgaagctggacggccttgagtcagcaatgttctagttaatatctctcctccatttgtccccccgctctgcatttcctggttttttcaacagagtcatctggggaaaacccacacattttatgatattttgtcttccccttcctctctgttaaaataaatgcctgtcacatttgatactcatctgaattactgatgttgggcatgagatggtggggccatgcgatccctctggagacaggaatctggtttatttggatccccaggagctcatgaatactgtgagttaggcttttggctcttaaagaagagagtccataatatcccagaacaatgcctcagtagcagatttagttctcttttttttttctcctgattgtgttcctttttacctagcactaatgtgggtggctatggtgagagaagaacatgctaggaagaggttctctcattttcatattcttctcatgcacacatccactagggagctaggtggagatgcttgcaccccaagagctctgggcccagccactcattggaatcaataagccttcctaagggtttagagttgggggaactgaggcccagtgatgttctatatctctcttctataccccgaagacattgagttccataattgtaccatactttgcctggcatggcctgcactggcatggctcatgaaacatgataggggcctgcccagttgacccaggccccccttgaggcttggtgtgtgctgagagggtgactcctgtttcaggcattgacaagaaacccagtccaggggtttgtgttgctgacagcaggcaagctatcagcaggggtgtctgatataggctgtgagactccaaggtcaaaggaggaaaagcatctcagagtctctgtcggttggagagggcagagatgaaagtagaactcatggagtgaggcgtgacccaagcactacagggagaggcacatgcaaggcacaggcctctatgaatgcctgaggagtccattcagaatccagttagacctgccccggagcaggtgaaggtgggtcacgtggtcagagctggacccatggctgaatccattcagccactttctgctcaggccaggactgaccccaggacacagcctgcagtaggggagctcactgcccttgcttaggggcaggcaaagagattcaaaagccaaggggggcctggtaacactgacatcccaggctcagttctgctcatcagtccctgagtgagaaaagctgcaggtcttcaggcccttgtcactccctgctggtgttaatttactcacttcttagacgtctccgcagaaaggtcaagggctagatgagtaatcatggctgagctaatgcctcagcctcagccatcgattctcgacctcaattttcacaaatgtctcactatcttatccaaatatgcttcataccttggaggaaagggtgttcctggtgaagtttgcaaatgattgatttaagtggttgtggctttcagaaactggcataaaaaagaatgtgagcaaagaccgatctgcacaggaaccaaccattggatgctgctgtggggaggaatgtggataccaggaaacgggctctctccccctcctacaggagcccagagcctcctacctcagtccaccgattagagggtcacaggtttcaggatgcatcagaattacctggagaatgtgtcaacatgcaggttccagggccctggccctagagtcagattctatagatgtggcgcaagacccagaaatgtcatgtggccacgatccttcatgagcctgatggaggcatggtctcagagccttgctgctcaaagtgtggttggtggactgcaggcagtagaacagaaatgaagaatttcaggctacaggatcagaatctgcctttaacagaatcgccagtgattcttgtgcacgatgttgagaaatgctggcttagaccacattgtgagccccgttggctcttctctgggcccagatttttctctggctgtgttttgtgactccacttcactcacctctaattccctgagggaccccttccaccccaagataaatagaactgaccttctgggccacacactcttgcagggagacatgtacacacacacaggcacctaccaaggctgatgtggtagggccagcccagcagatctgggacctcagcaaagccaatctgagggcaagagaatgagaacagaaaaagtatgggggctacagccttgccaactgctcacagatttcagcaaagaaaacagcaataattaattctgccaatactttttgagcacctgctatgtgccaggccctgggggaatgacagccgccattcatataataccttttggttgataaaacatgttcactccattctgtcagtgaactgcacatacgacagagaaatgagcctgtgatatagaaagcatgatccccattttacagatgatgaaactgaggctccaagaaactgagttacttgtccaagatttaaaaatagcttttgagctgggatccccacttttttggctttcttccctcacactcaatgtgattaatttatttgctctacatggtcatttgagcattacccccgacatttttttctgccttttctgccatgatgactgtccagcatggagaagcattgtgtccagttgccactgaatttccattagatggggccactcatcctgaactacaagtggcactgagtatgcccatgctcacagcagctattcatcatagctaaattttcatcacagctaaaatgtggaagcaacccaagtgctcatggatgaatgaatgaataattaaaatgtggcacatacatagaataaaatattatttagccttaaaaaggaaggaaattcttacacatgctactacatagattagccttaagctaattgaaataagtcaatcgcaaaaagagaaatattatataattctacttacatgagacacttaagagtagtcaaaatcatagagacaggaagtagaatggtggctaccagggggtgggagaagagggaaatgaagagttcgtatttaatggacacagagtctccattttgcaagaaaaagagttttggagatggatggtgtgaaggttgcacattatcaatgtatttaacgctactcaactctacatttaaaaatgattaagatggtatattttatgttacctgtattttaccacaatttaaaaaaatgggaggtggaggaagagattctaagcagcttcctgtgtaaaggccagatcttggaactggaagttaggactgagccaccaatcatgaacggaatgaccactgggactgcacagaaatatattaatatgtcagccaaacccaagattcagaggctgagcagggatacgcaagacattgctttgaagtgttgattccttatcactcatcagtgaaaattcttaaacttggagcaacaatgaaatgcttcctgaacacaagaaaataaaacaacaaaataaagaacaaaacaagccctgaacatgcctgaaccaagaaagccaggatgtgagggtgatgagcatgagggtgtgggcatgggcggattgcatggggctgggagtgcacagcgggggagcctgaatgagcaggcagagggacctgtgggcgcttgcttttgcttccgggtcttcttcattatcatgggcccggggaatctgagagggtctcacagtgcccacagccttacccttatcccaggtgcaactgctgatcctccctgaaacaccagctcataagggcatcctcatgtggaccagaagcaatgacactggccgtgtgtcacagcttacagagcatcttcatgtgccacccaatcatctatgccctggtgggagtactatctccactcattttacagatgatgaaactgagactcagaccagtaaagctgtctgtccaaggaataaccagagggtagacttgcatccagactccaggctccaaggcccaaactctgcatctggcacctcatggtctcatgtctccggaataagtactcaatagccacagctgaggtgcctcatgcatcatgggcagccacagcccctgccccagtccccttgtctgatgaacacacatcatgatgccactctataaagaggaccgttgccagaaaggattaattcattaatgaatatgaggtctctggaaacccagaacgtgatgtaaatacccgtgctgtcaaagctgcctctctgttgcagaatgaaaagcaccaaaatccctccattgtccttggataatagctttgatttggggcagggcaggaggaaggagactctgtctgggggataaacaatgctgggatgttccaacatagcaggatttgcacacaggatccagcagagatggcgtgcttttctcaatattgtctgggatatcaaatgggaagactggaacagccaggggagatttggatgcctgagatctggagctgctggagctgaaggaattgatttccaactagatttctcacacgcctcgtgcttgggctggatggctgaaggtcagcccagctggcactgtcacctggagcacggacttagggtcttgccatggggtccaggcttctcaccgcatacagagtgagttctgaaggagaagatcttcaagggaacaagtgtcctaagagaccaccctcaaatgccatgtggttccaacttttctcaaggggaaggtacagttttagccagcccagacccaagggaagggatcagagacattcttgatgggaagagtgtcaaagatttgggggccatgttttaaagccatcacagggaaggacgtcagggtttggtataggattgagtttgaataccctagtcccagacacccaccccgtctctatgaggaagataatacagaacactccaacacttttttttcttttcatttttgagacagagtctccttctgtcacccaggttggagtgaagtggcgtgatcttggctcactgcaacctccacctcctgggttcaagtgattctcctgcctcagcctcctaagtagctggtactacagacacacatgaccatgccgggctaatttttgtatttttagaggagacaggatttcactatgtgggccaggctggtctcgaactcctgaccgcaaacgatccgcccgcctcagcctcccaaagtgctgggattgcagacttgagccaccgcacccagcccccaacactttgaattaaaccattttcatccttgaggcataagttttagggtccttaaggaacctaggtccttgcctttatttattgatgacaaaactgaagccacgagaggacacttgttatggccaatgtcacatgtctgctaagtgtcacagccagtgttcaaaaggaggctgctgactccaaatccaacactgactctttgctcccaggtctggctgctatagcagctgggctgcctcgttctttctaccaagatatggaatccatctttagagctgagtaaccagctgcaaaccagagccttccagcttctcttcctctaggagaagggcaaggaacagggcggcccagggatgtgtgctgtctagggaggctgtaggctggcagacaaataagagcagatcagctgacccccactccccccagggcgggtctatgatgggcaattggataaacacattcagaacaggatgaatgtgcagccgagcgtgagcacattttaaaatatacatttcacctccatatgcagatcccagtgacatgtgacaaatgtgctgtggcctccaggagctgttctccaaggaggcacttatttcatttgactccaagcatccaacctcaacagatggcagaattcagatgggtggcgggaagcaggcttcaattactgcaggaagactcaagttagacaatgggaagaactttccttctctggaacaccagcttttttcagcgactattttgcaatgtgatacacagactcaacatagacactttcacgtgaataaaagtgctctctgtagaaatggggggaaaaaaacctggttgatagaaacttagacttttagctcagactcccagattttctgcaatacactcattccacaaagggtgtcacccttgtgagcacttttggcttaaatgaaggctcagtgtctctttttggagagcagacaacatgttaaggacataaatatgtagatctgcgggtttacttgttttgttttttttttttgtttttttttttgagatggggtctcactatgttgaccagtctggtctcgaacttctggcctcaagcaatcctcccatcttggcctcccaaagggctgggattacaggcgtgagccaccatgcctgacctgaaatatgtagatttgaacttgaaaacctgagaactgaagccctgtaaccttttccaaactaatctgtgagacaggaaggggtttagaattatataaataagtcacctgcttgtgtgtcaggcacattttttctttttctgttgttgttgtgggggataacaccctttgtgagataaaactcacaaccatacaattatacaattcatccatttaaagtgtataatgcagtgaattatcgtatattcacatagttatgcagccatcattgtaagtcaattttagaaaatgttcattaccccaaaaagaaattccatacccttcacttccacacaaactctttgcctaggcaaccactaatcttctttccgtgtctatagacttacctattctgaacattgcaatacactagtctttcgtgtctgacttctttcccttatcatgttatttcaaggtttgtctatgttgcagcatgtatgccttcattcctttttattgtggaaaaagtgttcactgtatggatatgctatatttaatttatccgatcatcagctgatgggcatgtgggcggtttctattttggggtgatcatgaatactactgctatgagcattcatgtacaaggtttcctgtggatgtatgtcttcatttatcttggatatggacttagcagtggaattgctgagcatggaactgtacatttaacttcttgaggaactcccaaactgcttttcaaagaggctgaccatgttacactcacaacaacagtgtatgaggatccaattttttcacattctctccaacacttgttattatctgtctttttcatggtggccatcctactgggtggggaggtgcttcttttatgttatctcatttcatcttcagaacgctgccataagggcaggcactaccatcccaatgtacagatcacaatagtgaggctccaagaggttgagcctgtcaaggttgcaaagctggtaaagaggcataaagatgtgttgtcaggtttgcctgacacctctcccacttccctgtatcccagtccactctcaggcccgtcacgccacctgcatagccctctccatgtgtttatctttgtgttccacgtgtgactcattgctgagatggtcaggaatgacagcgactgaactttctatccaaactcaccttccttccctgagccttgagatggaaccatcccctcctggctgtgggcattccttctgtcaagggtgagagccagcccagactgccatgaaataaaccaacatgcttctcttccccaacccctccatcagtgcccagatccagccccactaggctccacctggctccatagctatttcacccacctcttggagcacatgaggctcttgcctggtccatcaatggcttcagggatctcccacatcagacttccaggaaatctccctttggttcaaaaaatcgtaatgaacaggaccctaaacaacctagcacctcctaagacccatgctgacatgggcccttggtcgtgagttgcatcattcagcctcctgctgaatgaggtcagcacctgctggacccacccatctcctgactcttccccttccccaccacacaggaagacaactgatgcagggagcatcagtgtcaggtgtgttgtatttatgtgacgcacacagttccctactctcccaccattgttcttcgatatatgacaaaactcccaatttgtcaaatgcttaacagcagtcaggaaaatgtattctccacacatccaccgagcttttcattttgcacaactgtcagcaagaacagtttacaaattttctgtcatggagattctgaaagaatggggaagaggggagaaacaccccccaccccaaccccttctgtgagtcacagcctcaacttgacagaagcccaggcagcagctgagactcccctgttacattacacgtcatcactctttgcatttaagcccattttccatgcagccatttctgaatgcatttctgtttccatcaaatccctccccatggtgtaaaagtaaatattagacagtgccctcctcctaaaagaccttgtatttcaagctcaaaaaagtctcctagagggactcagtagtagacagctgtctgctccacagatgccagccagcttccctggctgacatgcaacagattatcatgcaaacccagaagcctcaagcttttaagacattatatattgaaaatatacactgaatcatctttaacagaaaaaaaaaaactaaaaccaaccaaaatttccaaagagagacaatcgattaaataaattatgataacccccaaaatggaccatggtccaccatggaaagagtgtttctgtggtgtgggaatgtggttaggatatgttaactaaagcaagtttcaaaactgtatttacagtatgattcccatttagtaaatgtatgtatgtatatttatgcatagggggaaaaaagaccagatggatagacaccctaaatgttaacactcaagagattatctgctttttaaaaagatttttattttcatgtattttccacattttcttccatgaagcaaaaactttttttgaaaaagttgtttctgctcaacagtctattcatggaccattccaaaaactttaaacttggcagactgcggccagttgtacagtaaacataatttacagcccaatggctttctggcagtgagcactttttcattcacaccaggtgatgccatactgaacagcagctgtccatatgattttaatcacagtaacttttgaaaccacaacttgcagtgccccttattttgttccattaaaaagctgtcttttgaagctaatgagcaaattctctgagaactggaacctagcaaatgctgaatcactgggcgaatagcccgttaaatccatactagttatgcagctctttgaagacacacacagcttaggtaacttgaaacttccctctgagaatatataagatctctggttatcatatgtaaatgtaagtcaatgcctaacaagaaatgattatttgcaaataccttggctatgatctaagttgcagatctaatttgaggagtagcagagtgatcactttagcacagacctggaggctaagattaccctttacagggaaatcctgaatagggttgagacttcccaagagacagattctatgagctactcacaattacaactgtctaagctgaaagaaaatttcaacactaaatcccttagtctttccttttcctttctattcagtctcttctgttttatctcctttcctacccaccttgaatatttcttgagctatctctttaataatacttttagaatgtgctttcaaaacgtttgctttcagtccttcacaaccacttgaaggggaaaagaaggaaaaggacaaaaaaatatacatcccttgtgtatgagtttgctagagctgctataacaaagtaccatagactgggtggggggtgggggcttaacaataggaatttatcatcctattgttctagaaactgaaagtccaagatcaaggtgtcagcagggtggattcctttgaagggctgtgaaagaatctgttccatgcctctctcctagcttctggtggtttgctggcaatctctggtgtttcttggcttgcagaagcatcaccctgatctctgcattcaatttcacatagcattctccccaagtgcatggctctgtctaaacttcccctttttgtaaggacacctgtcacaatggatttgaacacccccaacacacacacctaatgaccttatcttaatttaactgcatgcacaatgaccgtatttccaaataaggtcatattctgagatcagagggttaggacttcaacatataattcaggtccatagtaccttgtaccaatccaaccacaactttctttgaacctatgccccaatcagggtcctgagcactgctggagaaaactgtacaatctccaagtgatagcgtgggttccagtgtcagccgagctaacactcctttgtcaccacccccttctattccccactgcagcttttttcaactttcaccatgctcctctattccctcaacttcaggaaatgatcttacctcctacttcacagaagcaaacagaggccatcccaaaagaatgttctgaccaccctgcaatgaattatttccctttacttgctgtgttagttcattttcatgctgctgataaggacatacctgagactgggcaatttacaaaagaaagaggtttaatgcacttacagttccacatggctggggaggcctcacaatcatggcagaaggcaaggaagagcaagtcacatcttacgtggataggtggtctcaggcaaagagagagcttgtatagaggaactctcggttttttttgttgttttcttttttttttttctattttttttttaattatactttaagttttagggtacatgtgcacattgtgcaggttagttacatatgtatacatgtgccatgctggtgtgctgcacccactaactcgtcatctagcattaggtatatctcccaatgctatccctcccccctccccccaccccaccacagtccccagagtgtgatattccccttcctgtgtccatgtgatctcattgttcaattcccacctatgagtgagaatatgcggtgtttggttttttgttcttgcgatagtttactgagaatgatgatttccaatttcatccatgtccctacaaaggacacgaactcatcattttttatggctgcatagtattccatggtgtatatgtgccacaatttcttaatccagtctatcattgttggacatttcggttggttccaagtctttgctattgtgaataatgctgcaataaacatatgtgtgcatgtgtctttatagcagcatgatttatagtcatttgggtatatacccagtaatgggatggctgggtcaaatggtatttctagttctacatccctgaggaatcgccacagtgacttctacaatggttgaactggattacagtcccaccaacagtgtaaaagtgttcctatttctccacatcctctccagcacctgttgtttcctgactttttaatgatggccattctaactggtgtgagatggtatctcattgtggttttgatttgcatttctctgatggccagtgatgatgagcattttttcatgtgttttttggctgcataaatgtcttcttttgagaagtgtctgttcatgtccttcgcccactttttgatggggttgtttgtttttttcttgtaaatttgtttgagttcattgtagattctggatattagccctttgtcagatgagtaggttgcgaaaattttctcccattttgtaggttgcctgttcactctgatggtagtttcttttgctgtgcagaagctctttagtttaatgagatcccatttgtgaattttggcttttgttgccattgcttttggtgttttggacatgaagtccttgcccatgcctatgtcctgaatggtaatgcctaggttttctcctagggtttttatggttttaggtctaacgtttaaatctttaatccatcttgaattgatttttgtataaggcataaggaagggatccagtttcagctttctacatatggctagccagttttcccagcaccatttattaaatagggaatcctttccccattgcttgtttttctcaggtttgtcaaagatcagatagttgtagatatgcagcgttatttctgagggctctgttctgttccattgatctatatctctgttttggtaccagtaccatgctgttttggttactgtagccttgtagtatagtttgaagtcaggtagtgtgatgcctccagctttgttcttttgggttaggattgacttggcgatgcgggctcttttttggttccatatgaactttaaagtagttttttccaattctgtgaagaaaggcattggtagcttgatggggatggcattgaaactgtaaattaccttgggcagtatggccattttcacaatattgattcttcctacccatgagcatggaatgttcttccatttgtttgtatcctcttttatttccttgagcagtggtttgtagttctccttgaagaggtccttcacatcccttgtaagttggattcctaggtattttattctctttgaagcaattgtgaatgggagttcactcatgatttggctctctgtttgtctgttgttggtgtataagaatgcttgtgatttttgtacattgattttgtatcctgagaatttgctgaagttgcttaacagcttaaggagattttgggctgagacaatggggttttctagatatacaatcatgtcatctgcaaacagggacaatttgacttcctcttttcctaattgaataccctttatttccttctcctgcctcattgccctggccagaacttccaacactatgttgaataggagtggtgagagagggcatccctgtcttgtgccagttttccaagggaatgcttccagtttttgcccattcagtatgatattggctgtgggtttgtcatagatagctcttattattttgaaatacctcccatcaatacctaatttattgagagtttttagcatgaagggttgttgaattttgtcaaaggctttttccgcatctattgagataatcatgtggtttttgtctttggctctgtttatatgctggattacatttattgatttgcgtatattgaaccagccttgcatcccagggatgaagcctacttgatcatggtggataagctttttgatgtgctgctggattcggtttgccagtattttattgaggatttttgcctcaatgttcatcaaggatattggtctaaaattctcttttttggttgtgtctctgcccggctttggtatcagaatgatgctggcctcataaaatgagttagggaggattccctctttttctgttgattggaatagcttcagaaggaatggtaccagttcctccttgtacctctggtagaattcagctgtgaatccatctggtcctggactctttttggttggtaaactattgattattgccacaatttcagatcctgttattggtctattcagagattcaacttcttcctggtttagtcttgggagggtgtatgtgttgaggagtttatccatttcttctagattttctagtttatttgcgtagaggtgtttgtagtactctctgatagtagtttgtatttctgtgggattggtggtgatatcccctttatcattttttattgcatctatttgattcttctctctttttttctttattagtcttgatagtggtctatcaattttgttgatcctttcaaaaaaccagctcctggattcattgattttttgaagggttttttgtatctctatttccttcagttctgctctgattttagttatttcttgccttctgctagcttttgaatgtgtttgctcttgcttttcttgttcttttaattgtgatgttagggtgtcaattttggatctttcctgctttctcttgtgggcatttagtgctagaaatttccctctacacactgctttgaatgcgtcccagagattctggtatgtcgtgtctttgttctcgttggtttcaaagaacatctttatttctgccttcatttcgttatgtacccaagtagtcattcaggagcaggttgttcagtttccatgtcgttgagcggctttgagtgagattcttaatcctgagttctagtttgattgcactgtggtctgagagatagtttgttataatttctgttcttttacatttgctgaggagtgctttacttccaactatgtggtcaattttggaataggtgtgttgtggtgctgaaaaaaatgtatattctgttgatttggggtggagagttctgtagatgtctattaggtccgcttggtgcagagctgagttcaattcctgggtatccttgttgactttctgtccgttgatctgtctaatgttgacaggggggtgttaaagtctcccattattaatgtgtgggagtctaagtctctttgtaggtcactcaggacttgctttatgaatctgggtgctcctgtattgggtgcatatatatttaggatagttagctcttcttgttgaattgatccctttaccattatgtaatggccttctttgtctcttttgatctttgttggtttaaagtctgttttatcagagactaggattgcaacccctgcctttttttgttttccatttgcttggtagatcttcctccatccttttattttgagcctatgtgtgtctctgcacgtgagatgggtttcctgaatacagcacactgatgggtcttgactctttatccaacttgccagtctgtgtcttttaattggagaatttagtccatttacatttaaagttagtatttttatatgtgaatttgatcctgtcattatgatgttagctggtgattttgctcgtaagttgatgcagtttcttcctagtctcgatggtctttacattttggcatgattttgcagcggctggtaccggttgctcctttccatgtttagcgcttccttcaggagctcttttagggcaggcctggtggtgacaaaatgtctcagcatttgcttgtctgtaaagtatttaatttctccttcacttatgaagcttagtttggctggatatgaaattctgggttgaaaattcttttctttaagaatgttgaatattggcccccactctcttctggcttgtagggtttctgctgagagatccgctgttagtctgatgggcttccctttgagggtaacccgacctttctctctggctgcccttaacattttttccttcatttcaactttggtgaatctgacaattatgtgtcttggagttgctcttctcgaggagtatctttgtggcattctctgtatttcctgaatctgaacgttggcctgccttgctagattggggaagttctcctggataatatcctgcagagtgttttccaacttggttccattctccctgtcactttcaggtacaccaatcagacgtagatttggtcttttcacatagtcccatatttcttggaggctttgctcatttctttttattcttttttctctaaacttcccttctcgcttcatttcattcatttcatctttcattgctgatgccctttcttccagttgatcacatcggctcctgaggcttctgcattcttcacgtagttctcgagccttggttttcagctccatcagctcctttaagcacttctctgtattggttattctagttatacattcttctaaatttttttcaaagttttcaacttctttgcctttggtttgaatgtcctcccgtagctcagagtaatttgatcatctgaagccttcttctctcagctcgtcaaagtcattctgcatccagctttgttccgttgctggtgaggaactgcgttcctttggaggaggagaggcgctctgcgttttagaatttccagtttttctgttctgttttttccccatctttgtggttttatctacttttggtctttgatgatggtgatgtacagatgggttttcggtgtggatgtcctttctgtttgttagttttccttctaacagacaggaccctcagctgcaggtctgttggaataccctgccttgtgaggtgtcagtgtgcccctgctggggggtgcctcccagttaggctgctcgggggtcaggggtcagggacccacttgaggaggcagtctgcctattctgagatctccagctgcgtgctgggagaaccactgctctcttcaaagctgtcagacagggacacttaagtctgtagaggttactgctgtctttttgtttgtctgtgccctgcccccagaggtggagcctacagaggcaggcaggcctcctagagctgtggtgggctccacccagttcgagcttcctggctgctttgtttacctaagcaagcctgggcaatggcgggcgcccctcccccagcctcgttgtcgccttgcagtttgatctcagactgctgtgctagcagtcagcgagattccgtgggcgtaggaccctccgagccaggtgtgggatataatctcgtggtttgctgttttttaagccggtctgaaaagcgcaatattcgggtgggagtgacccaattttccaggtgcgtcagtcacccctttctttgacttcgaaagggaactccctgaccccttgcacttcccaagtgaggcaatgcctcgccctgcttcggcttgcgcacggtgcgcgcacccactggcctgcgcccactgtctggcactccctagtgagataaacccggtacctcagatggaaatgcagaaaacacccgtcttctgcatcgctcacgctgggagctgtagaccggaggtgttcctattcggccatcttggctcctcccccgaaactttcgtttttaaaaccatcagatctcatgagacccattcactatcaggagaacagcatgggaaagacccacccccatgattcaatcatctcccaccaggtccctccctcaacaagtgggaattatgggagctgcaagatgagatttgggtggggacaaagagccaaaccatatcacctgcctcctttctttccccctctgccctgtcctaaagcaaggtgcatccttccccctgggctctagatcgcctgccctccagctcctcgggccttgcccacaccaattaccctcttgcttctgtcttcaacctccccatctccactggctcctttccattagcatttaaacatgtccaaatcttttccctcaagaacacccatagctcttatctccaggtctctccaacaacctcctgtccccaccacatagccaaattcatcaaaagagaaaaataagttatctccacttttcttgtcctcaacccattctatcagactcttgccatcacctgtggattgtaaattctcctgccatggattcctccattgccctcttaaggggccgcttggcaagcatacaatgccattgacctcatcctcctttaaatatggaattccttggcttctgagtgatcctatagcctctcagttttccttctggatttgctgtgctggccactccctagatgttcaatggttgcatttcttggcattgttttcaagctctttcccttctctttctgatctcatctagtactatgaattaaactactacctagatcctggtgactctcaaatgtctacttccagtctacttttttctcctaaattgcagatgcccacattcctctctaatattacatctcccatgggtgacctacatccaataatagttatgaaagagaacagctaatagcagtaggctgagtgatggacttaggaagggcaaagacccctttggcagggttaagaaaagcagaggtgaaatgagagaggtcaggacagtcacctgaagtatttcatagttctctaaaaagtactctcagattcaaatttccttgacactttgctaaccgttctgcacacctacatcctaaaggacagggctctccttaacatgaattaaatttgaatatgcctctaccttagaaaatatattgttcctctaccagtgtcctggcatatggagactgcctactgaaaatcatgggtatgacattgatttgtgtaatgctagctttggagtacatgtagctttttctctatggacttaaattttttttttttttgagacggagtctcactctgctgcccaggctggagtgcagtggcgccatctcggctcactgcaagctccacctcctgggttcatgccattctcctgcctcagcctcccgagtagctgggactacaggcacccgccaacatgccggctaattttttgtatttttagtagagacggggtttcaccttgttagccaggatggtctcaatctcctgacctcctgttccacccaccttgacttcccaaagtgctggcattacaggcatgagccaccgtgcccggccagacttaaattttaagggaggcatttacattaaattatacttcccacaatccactcagcttggtctttggctccattgttgggtggaattacaattgctagtacagtagctggatgttaaatagaagtcagtgtagaacaatagatgtcgaaataaaaaacaagattagaaacagaaaagttcatggcttcaaaatgcatgttagcctggggtaaaaaaactgcatggatcttacagaacatggagtccagcactgatacggacaggagatagggaaatactggtttgaagaaggcagttcccgggcaaaggccccccaccttcaagccaagaaacccacagccctcagtgagaacaggcattcctgtttttgcatccaaaaagttgccttttggcctgctatgtccccctatcttgcatccatataaaccctgaaccccaggctccagaaagaaatgcacggacgaatggcaaaatggggcagcagagaagaagagaaaagaaggaaaatcatcttcccactccattccccctctagctccccatccatcccacggagagccacctccaccactcaaaaagacccccacattcactctttaagtccatgtgcagcctcattcttcctagactccaaacaagaacccgggtgccaagagggcactgagctggttaactttagctgtctgcagattgcaaagccaaaagagcatgctgtaacatgcccgctgggcttcaggagtcgcagacacccacccttagagacaaccagggggccagaggccaaagtccttgccctggctcctaaacctgcctgtctgtgtgctccccctcccgtaaggggtttgagcttgtggcagctgaacagagaggcatacccctgtcacatgtcatgtgggggaagcagggaactctcctgtttcagcaccttcatttttaaaacaaggatactaaggtttagagagaatagttacactttctcaaggttaaactctacggaatgggatgaaatggtgatagaattcagtgcttattccatctccatgtgagaggcctgagggacatggcatcattctgctagggccttcgagttattggaatttttgcaaagcatgtcaacatcccacccggcagaaactctggcatattcacttcatccacgtgcttcttctgggaccccttgttttagccaactccatacccatacttcaggagactcctgattttcctgaactctgagtcctggacttgtgttcccacacccagccttggctcttctctcaggctaaccttagccccatttgctctgctagaatgtccctttctgttttcttcctcctttggttctactgcaaccagcctcaccaaacagtattctgctcatctgtctaggagctctgcaatacacctgagctcataccctgccacacctgccccagccccacgaaggaaaacaaaacaatagcaacaaacaaacaaacaaacaaaaaaaaaaaaccctgctgaactcagattctgattcagctagcatgaagccatgacttgtaccaggcactgtcctaggtgctggggtgaacactgtcatatttaacttaacctaccagcctttcatagaatcctgctctgtgaaatttgcacaggggccaaagggaaacaaggcattatttataataattggcttgccattatccattctgttggcgctgcctgcaacaacatgatggacctgtatgctattcacagtctataaaaaagtagttctgttgtgattcaacatatagtaatctccattttaagaggacaatagaaacactcagctgttattcatcccagagccttaaacggcagagaattcctttatcaggaacataaggttagaacagcatgagttattaacattgaaagtagcccaatgcatttattgaggtgctcaaactattgaaaaaaattaacgatttttaaaagtaaaaggctagacctcaagtagcactttgggagaagtgtgtcaaaggcacaaactattcagaactgcttaggttgaaatgaggatggggaaagagtcttggtccccataacccaactcagttctgaatgttctgaagagagtaaaggagaaacgccaggcatgttcagaaatccagatttgaggggccaggagtggtgggaaatatgggagcagctgcaaatcatagttaattaacaatcattagggatacatgcataacacattttgtattcagttagctatttatttatttattcacagccacattccacaaagggcttgaggcagcctacaatggcaaaatgcaaacaagcgtaaaaagtcaggactagcatatacggtgaggaacaccttggccagaagggcacacatctgtcagccctaagggactccagaggtaccacagtcaagttccaaatttggcttgaggcatcctggcagccaaagtgaaaaggagacagggtcaggtccaagcattctctttaacaagacactgttaaatgtctttctttcaaagcaggtaaaaagctgaacactgacacagcggccccacaaataactgcagaatcagtggtctgcaactgcagtaaaatggatgggacaagggacaatggcaaaggagttgggttctggagctgaaagtcctcactgtgaggtccagcttaacctctactagctccagggtcctggagaagatgtttaatttctctggggcacgttcttattatgcataaaccagagatttaaaaagacttaatttgctaagtcgtgtgtcagaaagaagaaaaatgaaagagggagaacgaataaaggaatgaataggtatgtactatgaagtgaattgaaacatatagagcacctagcatatgaaacataccagaaccttttctagtttttttttttctttaattctttctgtgaaattgagtctgggtagcagactgttcctccatctgagtggctgtttgtcagtctctgtcttccctctcccatcctctgcccctaccactctcttcaacctcaactccagaggtagctggggctatgccacatctcaatctcagaacaccagggcacagagaagtaaagagacccaagtgatggatgggtgggtgagtctataattctcagaggaacattattagaaacaacaagtggtgatgggcacaggatcaaccaacacaatgagagagaaaaacagtcaactcggagatcaggtaatcagtgattgataatctgataatggttgaacactcacaaggaagggccatatactgaaatgagtccatttattttacatattcctaccttgagtgcttgttcacaaatatgctttacctaatccattctgattttgatgaaaagttccattttgtagaaatggaacttttgtagaacatttctacaaaatggaacttttcatcaaaatcagaatggatgccagcaatccatccaaaaccagaatagagccagcaatactggctgtcttgatgctaaacacttttcgatatcagctaacagcatgagactaactatcgagcttttgtgttttcagtgaccgtatttttctaagccaaacatttaaaaaattcacataaaagtcaaattacttgtatatattttgaggctcatctagtttaagaaaaaaaagctatcaaaaactgaatatctcttggaaattctgagtcatacagccactgcattaagctacttggacaggtgatcttcccatttttcagatgattctccttaccttcaagcttaggtaagaagtctctgctctctgttccctttgaacttgcacacatctccattctaacacttaccactctacagctgagtttctgattagactaagaacccactggccacaggatgtctgccctattcagttgcatgtttccaaaatttgctcaataacaaccaaagggaactgttttgcaagcgtagaaaatcagttcttcagtacactactaaatgcagcaagctaccctccttttttctacattgccctctacactttttagcttctagacttctcatcctgccttgaccagccccagctaggcctctttagttgcaagattccaagaagtcagagaggacctacattcacagggcctgagccagctcggagaaacgggccccctgggagtagccacagagggtcaggtggaatccatcatggtgcatcagggctgagagttgaatctgtacaatagcccaggccatgggaggccttcctaaggcccgacttgaccactaaggatctgttacttcttgggtccccaatctagcagtgagagtgaaggaaattctcaggttccttggccaaaacctcaactctctgccttcagaatatgagcttaatgagaattccctggatgagaaccactgtcattcatttaaatcacagctacacattaccgtgaagccttatcacactgggcctctctgatctcctgtaaagggtcatcaatttctgtatcttttacttttttttgtctgaataatgaacatactgctgaaagcaatgcccgggatgaccgggcacatctaggagattctaaaagtgtgagtttcagatttttggtacgattttattttcttcatgcttaaagtctcataaaattctggatccatttaatcatactacctaatcatatgtttatcatgaaaagtagcactaatgtggtaggcagactgtttttccatgtttctttctttctttctattttattttattttttatttttttaagagatagggtctctttcacctaggctagagcttattgcagcctcgcacacctgggatcaaacaaccctcttgcctcaacctcccatgcccatgtagctgggactacaggtatatgctaccacacccagctaatttttttaatttttttgtagagatgaggtctcactgtgttacctaggttggtcttgaactcctggcatcaagcaatctttctgccttggcctcccaaagcactggggttacaggcatgagccaccatgcctggccccatgtcctgtttctaaactaataattagcaaggtaaggcaaaaacggtccttttacctgtatttgagctcacatctacggaggcttcaacagaacaattccatgtcctatttttggaagaaagctccaatttctagccctagttttcagtgttgtggagtagttttatttcctgtctttcgtattttttttttaaaaaaagcttctccaacattttagttgcaatctgagacagtctgtttcagagacaaaattttacagccagatgctccagtgtgagccgctgcagtttgtttctaaggatgatcagtaacgaatggggaatgcttgtcatttgctcaaatattgtgaagtcttgtcttttcttgggcacatgcacacttttataggcaaggtttcatccatccgtaatgcctgctgggacaactgggagaacaggtcagtcatttgcagaaacagacctaaaaccctaaggcctaggagccatcacagcccccaccccatctggacattaacaagacacacagggtggggaaagaaggcaaatgggagtgcagtggagtcaggagataggcaactctgggcctccacttccgtgggggattttaataatctccctggagtcacagtgggttgttataaggaggcagagggaaggtaggatggttctgatacagaaaatagctcctcagtgggacaggggagatgacagcagagaagctttcaaccacctttttttttgtgatgccacaagtctctgcagctcacctgtatagcgctattgctctattccacgtgacaaaacatgagtcacctgctcaattagtttcattcagtccattatccctatagctagggagagctctctcccataaactggcaaatcattgttcaatatatttaatcttaatatggttgatccttccttttctttctttttacctctcttcctctctccatccttcttattcatccatccacctatctatccatccatttacctgaaggtatgttgaccatctactttgtgtcaggtactattccaagcacttaatatacaatatctgattaaattttaacaataccctggaagttagctcttaatattctttatgaatattatatgaggtttagagagtttatgtgtcttgtccaagattcagcaaaattcagcccatgggctaaattcaacctatttttgtaaataaagtttagttggaacatatccatgcccatttgtttacgtatgacacaatttcagcagagtggagtagttacaacagagaccatttggtccacaaatgctaacatatttactaactggcccttaactgaaaaagtttgccaacccctgttcttgcccagtaatacttagcaagaaagtagcagagtcaaagattcaaacccagatctatttaactcaaaaggccataattcttcaatgctgtgtcatgcaacagaagtatgtgagttttgtctacatgacttcttgacacctagggtgagatggccaggctagatttatggtaagaggaacagatctgacatatattacttagtaagtagccaattactgtggaagactctcttcatttgtaagaaaagccagtgaggatgctttttttttttttcctggtgaagtaattatagagacgagtgttgatgcatgttttgactttgctgcaaaagtagttctgtcttctccagtttaagtaattacattagtttctaaatagagcagatggaactatagttgtcaaagaatgcaaagatcagtcaactgcatttatggtgtgacattctaagcagagataccgcaaagtatcttgtgcaaaaccaactaggtgagtgctattgagcacctgtgagccagaagaaaacaggagaaaaatgtggctaaatggaaatggaaatttctacacaatgggatctggtggcaaacacattttcctaccataatgccccaacaattgcttgttttctaatgttgcctggttgggggaagatatattctgagtgttcctccaaacttgtagaactcaatttttctgggggagagggttgtcctaagatggtctgcttggtactcagagtgcaaagatgtctcctgcaagaagcaagcagcttatgaaggaagcaatgacttaaagcagacacgttacctctaaagaacagggagaagatcaaatccagaaccaggcagtagtaataagggaactgacctggcaataggccaaggatccaaacgacatgggaaccaggcatgattcaaaacagccactgctgaacacctacaccaatggggggaaaaatgatactcttagcgttagagtccacaactgctacagagtctcagctgtgatttctactgccgggtgtccccatagaagtctgcatcccaacccctgagacctgtgaatatgttaccttacttagcaaaagggactttgcagatataattaagctaaagatcttgagatggggagattattcttcattttttgggtgggctcagtgtaatcacaagtgtccttgtaaatgaaagtgggaggtaagagggtcagagtcagagagagatgtcaagatgctacactgctacctttgaagatagaggaaggggccatgagccaagcagtgcagacagcttctaggagctagaaaaagtcagccgacagattctgtcccagaacctctagaaccaacacatccaggcaacaccttgattttagcccagtgaaacccatttcagacatctgactcccagaaggccagaagataataaatttgtgtggtttcaagccactatgtctatggtaatttgttatagcagcaatgataaactaatacaacagccctgacttggggggagggtaaaggaaagagccacacaccaccaccctctcaccatgggaggaatagttgaaatgaacacatgacttcaggtccccaacaaagagctgaatgggtttcaggctagcttgctaattcattcaccaattctcagctctggtgttgcttgattcagaaggtaaagacaatttttaaatttccttaatttcaaaacttaattcatccaatgcatttaatttaaaatcatacattatttatccacaaatcctgatacacagggaaagaaacagaaatatttgctggacaggtggcatggaaacaaagggttattagcgattgccatgcaggcctaagtgaattcacaatgaccatcatgacatcatgtctgttgttactatcaagagcgttgctcttggataagtatcaataacctcagaactatggaaagaaccatgtgtggagtttggcaccacagatattctctgagtgattgaagtctcttctaccatggtgagtggtaccatggaagtaatcttgtccccaggcctcctaagcttacttatgatgaagtgatgagactcttacccaagaaaccattacagaaaaaaaaatcctcgcctaataaaattgtgccagtgaacaaactctcagatatatggccatattgacaagatctgcaatggtatcaaaagaggtcaagctaataacctgaggaaacaggaagaaaactccaattgtcttatacagaaggtctacaatcaataggatgaagtctaacactggcgagagtggggtgagatggatgaacttctctaccacctggtgatgaaatacattgggattctatgaaaaagcatttttttctaaactcaatttccatattaattttagagctatatgtaattagttaaaaatgttcctgaagacttaaatcaagataatcttttagaagtaacaaaatgatctacacatgaaaatactcaattcagcttcacatattgccacatgttatgttccctgagaagcagactctgagagtttagcatgtagatgttttaagtggtttccgtggggtcaacagctatgcagaataggggaagttagcaggaatggggcagaaatagaagtcaagctgtgaggtaggcccaataacatcttcagctaacctgctggggagctctaaggctggaatgtgagttgtcctgttttggggatgaaatggtaaaacatttaaactcttgattctctgagtcagtgaacattggctgccccaggaaggagcccaatcttgggcaaggcaactctctaaagctgaggggattcttgaagaagcttgtgtaaatgaatgaatgaatgaatgaatgcaagcttgtgcaaggttaacccagtggacttggggtactcaaactctgcacattttaaagagaagactggccccttgaccatcctgggagataacctataagcctttggaatacctagcctgatacaaatgtctttgtgtatctggggtcttgggatatgccagatagtttatgcaaacaatgtgatttatggtgaatgcctgtttttgttcacctggggccctggtcatgctgtattggttggacgccggagactgagcagtcatggaggtaccccaggcctatgtgactagcccccagtagaaaccctagagaccaaagctcaggtgagcttccttgttggcaatccttcctatgcattgtcacacactgttgctgagaggatgaagcattgctggcacaaccccaagatcacacatgctttctcctatgctgtttttgttgttgttgttgttttgtttttttgtttttgagacggagtctcactctgtcgcccaggctgcagtgcagtggtgcgatcttggctcactgcaatctctgcctcctgcattccagcgattctcctgcctcagcctccttaatagctgggattacaggcctggctaatttttgcatttttagtagagatgggatttcaccatattggttaggctggtctcgaactcctgactttgtgatccactcacctcgacctcccaaagtgctggggttacaggcgtgagccaccacacccggccactatcctatgcttcttttaaaaccagccgttcactgttaatctgtattcttttactatattatctatatttactatgtttactaatttttactgtattactaattttatatattatactaaatttatgtaatattactaattttactatattttactatatttattaatatttactatattaatatatatcttttactatattaaactggaacatgagtatagcagctttcctgagttctgtgagtccttttataaatcatcaagcctaaggatggtctcagggacccctgacatagggctagcacttaagagcagcctgctagctgtagtctcagcagctagggtaacaaatcctttcttgaagggatagccaggtggcacatcacagtatgtacctataaaagctagaaacaagtgaaatattcataaataggacatctatttggcaaagtagaagttaggaagtacccagccaagctctgcctcatggaataagagtgctttttgagaatgattccaatatctatcttcatttgctatacatatggagaaaacagtcctctcagtttggggagaaactctgaattattcttaaagaatctctggttatcccctctagcttacactgaacattctaggtccttgagaagatcctcatttcaaaggcaatagaaaccatctgaaattgattcattggaaaatgtatatgctattaacaccagagagcagaagtagactggctaaaatatagcaacttgaaatatattttatgtactggaatttgatcaaatagatggataacttctggaatgatgacagcaaacaatctttggaaaaacacatgactgtgcttggagaacggtatcatagtttttaagaaatgtacactgcatagctagatagcatagcagtgtccatttaaaccccaatctaacacttcgttgtaagttgacagtaggagaaaatggttattagaatatggtttgacaggccaggagctatggctcacacctgtaatcccagcactttgggaggctgaggcaggaagatcacttgaggccaggagttcgagacagtgcaaaacctcattgtctttacttaaaatacaaaaattagctgagtgtggtagcacacgcctgtaatcccagctactctggtggctgaggcacgagaattgcttgtacctgggaggtggaggtcacagtgagctgtaattacaccactgccctccagcctgggcaacacagcaagactctgaaaatatatatatatatatatatatatatatatatataataaaatattaatatattataataatataatttattatatataattatctataatatattataatataattattatatataatataatatataattatatataatatattataataatataatataatatataattatatataatatattataatatattatatattatattatatatattatatatatataatatatatataatatatatattatatatattatatatatattataaatatataatatatatataatatatatataatataataatatatatattataataatataatatattatatatataattatatataatattatatatatggtttgatgggttacttgataactgccaattcagtcttgagatgaggaacaaaactgaaatatgaaacatgactggtctggtagaccacaggactgcttctggtccaccgactgtgaacgttaatgatgtgtgttcattgctgggttgaggtaagtatgagttggtgcactaccccctatttctctctttctttgtcacagaggccttgaaagctccatgatagagatgacagagctataagatgaaagcagcccaaatccctgagtcaccaatgtttgaagaagagcttcccaggagaggtaccagacccacatgagacttcacatgattataaaatgaacttctattgtgttgaatctctgaacttcagggttgttttgcagcacagactacattatagtgacaagtagaggaaggtacaggcatgctaatttcattttaaaattaatcaaggattgtcaatggaaaataaagatttcagattccttgcaccttaaaaaagacgaaaaatatgtcttttttcttccccaacccctgcttatgtgaagcattatagtctaatagctggcattttagagagatgaaaaagatgagtttgcttcaaaatgtatatatgaccagactgtaaattcacatgcaacgcagtctgctttgggagttaaacatattatttaaacaaatcattataacttgacttattatacctcaatttgattataaaacaaacattaaagtgaaatctaaggtaagtcttttttatttccagttccaaagccatttccatttcttacttatctttgaatcctcagccccaagcacagtgcctgaaacacagcaggtatccacaatctttggatgactgaatgaaaaggaaagtttaaagtcaattacctttaatcttgcttgtggtttctcagagctaatttgaacactagatggagaaatactgaaaaaaaatatttttcagaaaggcaagcatcctcttggtctgagaggtttcataacaagttaattttattttaaatcagtatgaatggatggatgataaactttggaaagtcacacttagaactacattgaaaacaaatgaatgtgtccccagatgaaaaataataactatgtaaataaaatttgaaataaccacttgatagcaaagagaactccagtatcaagaaatattttaaattccatgcaatggttaattatattcctgaaatctatgcacaaaagggcaaaattgaagaaaaaaaagaatataggttaagatgaaattcgtgaacaagaacctgaaaaatataataggcaacaatgtgctgcatttccacatttaagaggctttaacatccatatttttctcccatgtgcaattacatgaacttataatccttgaaaaattgttattatttttgttgctaaaactgcttgtaataggagtcacagatatgtgtagtaatatgctcagatgattacatttgaacaaataccatggtaataattctcatatttggaaatgctagaatctgaattacacatacagtttgtggcatctcttttttgaagccttagattttattttattttttgttttaagaccaagtaaaaatccaactttcagctaatggaattctaggtctagttggtagaacgagatccagatggagttcaaaacacctgctgaatagtatctgtaaactgccagcttgatatcgtcaccaagaattctgcaagctgagtgtccacattggaatcttaaggacttgcatacagtgtagttatatataactcataagaactaattattaactactagactgtgaggactctttctttggcttttaaggaaagtcaccgagttaatgctgaatatatttctaaaaaattgtacttatgaaattaatagagttgaccgacaatttgaataatattaggctacagtaacctcgaacttgattactcttatacatggtaaaacaatccagaaatcctggggaagggttgtttattatggctgcatggaggttgcccaagccctggcattcttttacagtttcaagggagggcaaaagtctgaagtgggtagggactgagccatacttaataatttaaacttagtatcatggaacaattcacacccgttacatacaagttaaataaccttcatgctgtgttgcaaactgctcttcctgctatacttcaaacagatagaatcattttacaaaataaaattaccaaaatgaggatatacttcataaaactgttcaagggagaagcaaacctttggtgaagagtgtgatataatcaccaatggctttaagaatgccattgggaggatcttaaaatggagatgggccagatgcagtggctcacacctgtaatcccaacactttggaggctgaggtgggggcatcacttgagatcaggagtttgagaccagcctggccaacacggtaaaacactgtctctactaaaaatacaaaaattagctgggcatggtgacgcatgcttgtaatcttagctactcaggaggctgaggcaggagaattgcttgaattcaggaggtggaggttgcagtgagccgagatcacaccactgcactccagcctgggtgacagagtgagactccaactcaaaaataattaattaattaatcaattaattaaaataaaatggagatgaaggatggaagtgatggtgagatgtgcaagttccagcatgtgtggatctgatggcttttgaaagtatcaactgtagggattctatcatattcttacaggaacctaacagtgttgatatatatgatgaaatatagcactcaaaccttcatggaagatggtgcctctgactctggagggatacaatgaggagagagagcacacagccatagtcgaggtctccaagtctatcatgcatcagcatcaccaagagggtttcctaagatttagattgctggatgccacccccagagtttctgattccataggtttaagtgaggacctaataatttgcattttcaacaagttatcaggttattctgacactgctggtcagggaactatgctttgagaattactggtctacgtgtttcacttagaagccagaatggttcaccactgtctccttctcactgggctaaaaatccaaagtcctaaccattgccagcaaggatctatgtgatctgggccttaacaatctttctgacatcatctcctgccagtctccttgttgctagcaccactcaaggctcattgtcctccttgctgatccttacatatgccaagcttgttcccccctcacatcctttgcaattgctgcttgctccctcaacccagaatggggttcctgcagatcttcaaagggcttgctatctcacttcattcagttctttgtgcagagaagctttccataaccatcctacttaaaatcgctcttctccacagttcccctttcattactgtctgtcccttccctgaaaatttttcatatcattttcacctgaagaataatatttatttaccgattgtcagctcctctaagaacagggacttggtttgattcactgctgagttcccagtgcataagaaagtatctgacacacagtaggcattcaatacaaatttgttaaagaaaaggatgaataattgattgaataaataattttaagaaagagcaactgcaaatatattagccagcctccaaactgacaaagctaagagggtaaaggtctgagatttaaaaatcaaacttgcatctatgaaaacactctataaataagaatgtacactatatgagagaatttctgttatacataaagaagggtgaattgtatctactcacaggagccaattgtgcacatctcttcccaacccaatattcaataactttacactgatagggagaaatcagtcacagtaggaatatttacacccaggaaattggcaaacattacaattcaaggcttatttttatcagcacactactgattctatccatagataaacacattccattactcagtttgatagcctcacccatgtacctgtcacccagaccagaggtgagacaggtttgttgccaattaaaggagggaaaatgggacatctcagtataacagattgggatagactgggaagcttatctaaatcttacttcaggatgtccatttagcggggctgaacatctactttgccctgcctgagcggtcgaaacataaaacaggtggacatggggatgtgtgcttttgaagatactcacccttcgctcctgctctacatgtattatggggaaactgatcctaatcttgagtctatggatagaatatatgactcatattattcaagtctaaagttgggcccaacaatggattttcagttacacaagtccataaaatctccctctgtcttacttatgactaaatgaatcctgactatgctgtgcttttttaaaagcaggatataaaatagtacaaacccaagtttgagcacaagtaaatcaaatacatactcaagccacaagtgacagaatggaataagcaccgaaccagtaaaatttctttatttttttgttggtagttgtacaaatctattctttgtctaaacatttttgcttaaattttagtcacattgtttctgcaattaaaaaatccataatatataggttgaatttcaattttcttctctgtttataaactgttttcccacacattagaaagatgtctaagataaacccatgaattaatggagaattaaaatggcagagccaatttaaataccacatatttaaacaaacactagaaaaaaaatctcttgcaacagagattgctatagcacattaattataaggtttcagatagatttttgtaactcaaacataaattttaaagaaccttcccatttgtttctttaagttattaatgtctccaatagaaggacaagttgacctttaaatctgaaccagctcagaaaaaggcccaaatgcacacttgacctcttctacaaggagcctattttagtcacaatacaattttacccactcacaggtgctctgtagcagcctgacagtggcatttacatttttttttaaataagctaagaaataatagaacaaggaacactggtagtcacttgctttaattgtaactttgggcctctgttctgtcttatcacccattttagctgacgaatgcacttcctcattccctgttttcctcgtggtaaagtaagaaacttgaatttgaaaccagagccctgagtctcctatgccctggccatccactgcctttgcatgcagcctctgttctggccctgaatccgctctctccgcaattcccagagcattccttgggtctcaactctaaggaagcatattcctttcacgaatcattttgtaggggacacaggagggtacattcccctagcacagcctacagcatttcactaaaaagcacccagagaactttccctaaagtctcctccttagcccacagtcttctgggctttccaagctttcccactttttctcttcttgatgtccctgtctgttatattgctcctaaatttcaggacactaggagacacaaaccaatcaaaagatttcacatgctcttttaggtattataattcagtgtttacaaattatctagacattaattagatccctctcttctaccttcctggtaatcttactccattctttccaggcacctgtctttttactctggccatggtccgtcagcatttcaaattgtctacgccgcttctgctttacaaaataaccagaaaatccctctccccccaacccgaatgaagctgggaattttaacctgccatctgtcagcagctatggacctatatgatatctccttttgacagccaaacatcataaaagtgttgtctacacagatggagttcattctttacctgctacaatctggtttctgcccataccacacctctgtacctgccctcaccaagtctaacaagttcttaatcaaatgggcatgttgcaccttgtgttacttgaaccaacgtgaagtgtaaatcccacacattagaatattagagatttcataagcaccagtaaaatttatttttttattggtagttatatgaatctattctttgtctatacatttttgcttacattttagtcacattgtttggtataaagagtgtaacactagttaccattcactgggaacttcattcactgggcaccaatctttaagtatagagacttctttaaaaaaaaaaaatttttttgagacagtgtcttgctttgtcgcccaggctggatggaagtggcatgatcttggctcactgcaacctttggattcaagtgattctcgtgcctcaggttcccgagtagctgggattagaggtgtgcattaccatgcccagctaatttttttatttttagcagagataggttttcaccatgttggccaggctggtctcgaactcctgaccaccgcctcagcctcccaaagtgctaggattacctgccatgccacccagcgagaatcttctctaatcaacacaagtattgaaaataagcattgggaaaaaaatgtctagagatgtttgaaattagtggaagacttaaatctacattgaggatcaccattcagcttgcctgggctgcctctgtgtcagtcagattttgctttctagctggaaaccacccttactccatctgggaatttgaaatgtggattgttcctcgggccccaccattaatgacaacacaaacacatatttttacatgattttaatcattgtgtatgttcaatggtgtctcctggcttatttatttagcattatatcataagcatgtttaaggttgcccaatagcatctataattaccattttaattgctgcataatattccactaagtggatggtcatgatttactaagccattaccatagtgttgggaatttaggttgcttccaatttttgctaccataaattgccctgcatatagcattttcctaggtttgaattaattctttaggataatttctccagcattgattgctggtttaaagagcatgagccatttttaagacctttcatacacatttcctattccttccaaaaggactgtgctaatctgtcactagcgatgtgtgagaggccttcctaagggtaattgcatgaactgataaagtgtgcactgagaacagcctggaaccctggatgaataagcagcagtgagagctgagagtataggatatattgaagaattataggtctgcaagaattgtctttgatgggggctttatacattctctctgtctcctcgctccctcgcctgaaaatcatttacagagtcattaatgagggtctctatcataggtcaggcatcagcttttctgtaaaccaaagcctacagactttggaaaagtccctctaagtctgtgatccacacaaacactgtgagtatgctttgccatcactgggagccagattaaggctgaatgtaattctttccagtggacccagagaacttgcaaatggcttggatgagccatttatgactgatattccctggaaaagaacctaagcagttggaataagcagccacagagaccaagagtggtaaagagaggcaaggcaaaggctagagaggcatgatatgatacctccatgcccaggcaagacctggtgtcgacagagggagcaatgcttggagcctgaagtcccagtttccagtcccagctctatcttgactatgcagcctcatactgacttctaagcgtcttagagtgccctcttccaagaggacccagatacctgtctcacaggctaacatggagctgagatgggagagcatagagcttgctttgaaagatgcagggaactacaaggttattaaatccaactcagcaaccagactgtttacaccagcagtgtgcctgtccagataatattgaatatgtctgggaattcagcctggggagacaagtgagtgccaaatggtctgtttctgcaaggctgccactaagaagaggattcacacactcctggaaacccttcagagcagttcaggttattgggccaaagctagagggccttgggtgtgggctcagaattagattttctgcatattaatgatcattctttcacatcacactatatgaatgacttccaactatttccaagttattttccaactgactgagaaagctctgatccttactagttgtgggacgttgacagagttatggacctccctgagtctcagtgacttatttgttaaatggagataaaaatgcctacatttggagtaagatagggaatagtaataatcttgatggtgacaacaatgataataatgtgaataataatgtgaatctgtagagttaatacaatgtgctcactctgagctaaactaaggactgtatgtacattatcccacctaatcctcataacagcctccggaggtaggaacattaaatacctgagatcaatgaggtacccagtgagtggtaactagtattacactctttaataccaataattcccaaggaagaataacctaattagttagtgggagagcaggattgttgaaatgagtattgcctcaaggattaaccccactttgggaggttaatgtaaaaaaccaaagtgatattgattgtgttaatgaatacatttagtgctctccttggatctgtatttgacttgtaattgggtagtttcctcccactttgactctgggcttggccacatgacttgttttggccaatgggacaacagcaaactgtgggcaagtggatgcttgaaaaagtgcttgtgcatttctgcttcttctcttggatccctacttcttccacgagaagacaccccaaggccaggctagcttattgaatgtcagaccaggtggaccaaagtggagtcacccagctgaagccacctgagaccatctagttccagctgacctgctagttaatccaagatgcacattgagtattgttacgcagcattattatggcaatagctgactgatgcaaccagttccattacttcacacatactattttcttcatacatgctgataacacctggtgaataagcattttgccaaaattctacatggattgtatcatttattccttatacaaaaacccatgaggtacatgctgttattacccttactttattttatttatttattttttgagagagggtcttgttctgtcacctaggctggagtgcagtggtgcaatcacagctcactgcagcctcaacctcccaggttcaagtgattctcctgtcctcagcctcctgagtagctaggactacaggtacatgcctccacactcagctatttttttttaattgagacaaggttttgctacgttgcccatgctggtctcaagctcctgggctcaagcaatcctcccaacttggcctcctaaagcactgggatcacaggtgtgagccaccatgcccagctaccttcactttcaagatgaaaatataaggtgcaaaaatttaaataccttacccaagcttacagttagtgatgggcaagcatttcaagctgggcagctcagcttcagagcctccgccacaaccactatgcattgctttgtgcacactataagagagctcctcataccaagctgctttatacgactggttgcaaccctccccttgcctgagcataatgcctctatggacctcccttttcagccaggccaggcatcatgaatcaagagctggctgccttcctctctgagcttatggctccttctccttctttgacaaggtgctctgggaagagagaacaccatcaggaaagaaagccttctagcaaacacaagatccacagattgaaggagtgaagtgctcttcatgatgcagtgctcttaaaatccaggctgtgtgatgggcctgaagagacccgcagaaaaccaagggggccctaactgcactcttgccacttctcagtaaagtcccaagaatcccaatctgcaactgagccttcaacaggctgtgcaggtttacagccctgttctcatccaggcctcattgtctctgtcacctggacctttgtgacagcctcctcttagggcctgcagcctccagactcaccttttctaatccgccttacactccaaaccagagagacttcccaaaacacatgtcactctctgcttaaagctctgcaatgtgtccctgagatgaaatacctgaaaacatcatccaagtcccctcccaatttatcagtacagccttccaggtcttgggcactgatcttcatgtttccaaagcagagtacagggctttcctttgtctatgttcatgccccttctcttatcaatatgctcttcatcactaggttaggctcttacctgtgcatcttgtatttgggcacagatacaggggacaggggctataggatgcaatgaagaataaggtgttttgcatggagggtaatgaccctgggtcttcctcatctctggtcatgagccctcaaagtccagagactcagcaaagtggtcttcagtgtaaccccagagcctggccccaggagcactcagggactttctgggaggtaggctgtgagtaaggagctccagattcatacacattaaggtaaagacctgggataatgatcagcaattcatttacattgccttaatcacaacacttagtccttaagcaataacttatattcatatgtattgcacagattactaagtatgtgctcttccatttctcattgaaggtacagtaaaagccttgccatcactcccattatacagaggaagaaactgagacctagagaagttcagaaccttgctacatcaatcagaagtacaagccaaggctcatgaagtggtttccttattttctcaccccaagttagtaagtctgtaacttctccttcacagtgcaatttgtcacgcagtctatggcactgtagaatttggctatagatccctaagtcagaaaagtccatgtttggagaactactagtaagtcaagacagaggagtgtgacaaaggctgacaaaaccctacctgcagcctggaggtcacaggcagcctgctttttgagtctccctgaatggaggggaaggggctctccctgagggaatgtgctcaactctgggtcgtgtggaagagttaggaagttaacactccatgagcgaccctcatccaatgtcggctgggaatgggtggataaataccctaactttctaaggtatatgtgtgtccagcagggcctccagtggggatgaaccacagttggccacaatggtaacctgcccattaacacacccttcattggtctttattcccttccctgagccttcactgtgttttcagggatcacctccgaaggaaatgacttacacccaaatcaggatctgtttttgagggaacccaacataacacatggagagatgggtttcctatgaagaaggaaatatgggctgtaaaataccacggagagtcagagtaagtacaggcggctacaacaaagatagatcaggtcacggaggtctctgggaatagaggaaagccacccagaggaaaaaaggacatgactgccactagcaccatatgtatgtttcagatgggatgtgtatttatgtgtgtgtgtgtgtgtgtgtgtgtgtgtgtgtgtgtgtagggaggggtgacagagagagagaggcagaataaatatcttggtcattggttacaagccaacaaaactgaagtgatgaaactcagtgagttttatagaaatgtgctggagatgcttcaattactttctcaataggtctattttgataactgaatgaaaagaatccatgtgaagcacctaccactcttcctggcttgtagtgaacacacaaaaagaattgttgattattgtagtagacactgtagtgtacctcctagattctccttacccagccactatacccatccccattgctgtgaggtcaggtgcccaggaatcacagcatcccacccacccttcccttgctccaggcaatgccctcaactggtaggtgtcactttgcccagaaactaccattcttctccaggggacccacggccaagggcaaactggcataggctatgcaaggctggcccctggcagaatgtatgtggaaggggcaactcttcagtgtgctttatggaccatggaccaaatccagctctccatttgcttttgtaaattgttattggaacacagccaccccattcctttttgaattgtccatggctgctttcctgctacaacagaagttgagttattgcaacagaggtcgtctgggccacaagatctaaagtatttactctggcccttgatggaagaaacttgtccaccgagccctagagctgcacttccaatatggtagccattggccatatgtggatatttcaatttaaattcattaaaattaaataaaattaatatttcagttcttcaactccaaaaattacattttgagtactcagtagccatgagtcgctggtgactctcctatcagcccagatacagaacactgccatcttcacaggaagttctgttggatggtgctgcactataggcttcagcttctgggtaaaactaaggggatacttaacctgaccacattctgactcaaccccacccacatccctccctcctcaacaggttcctccctcaataaatcacatgtacctgttctcctatctcaggctctatatctagagatcccaacctaagacagcctttttttttttttttttttttttttttttttgagatggagtttgctctgtcgctcaggctgcagtgcagtggcgtgaacgtggttcactgcagccttaatctactgggctcgagcaatccttccacttcagcctcctgagtagctgggactacagggtgtgttaccatggccagctactttttaaaaattgttttgtagagatggggtctcactatgttgtcagggctggtctccaactcctgggctcaagtgacccctcccaccctggcctccaatgtgttgggattacaggtgtgaaccaccatgcccagcctccaatgactaagatagttatgatatgcttgtattgcatccccaggttcatatctttgccattcttgtgatgagagtgtgggctactaagacacaggggaggatgccaggttcacctctaaatctccagtctccactacagtgtctgtcacagagcagcattcagtaaataatacatgaataaataaagtaaataaatggtcccctcatatgctgtacccctggtgtcccgtcaacagcccagagctcctcttaatccattcccactgcacgtttcaggttcaatttctcagacattcactttacccggaagtccagctgtgacagctaatagatgaaaccatccaatttgcaagttcccctgagtctctgctgtaaaatcagcctgatcctcaggaagttccacacctaggtctccactctcagccctatgacctcacctccacagactctgcacttgagcattccaccctcagcgcttgtgaaaggagtcatgggagacacaaggctggaggatgtgtctgcatcttcagaaacccgctaacagggacagcgtctgtgataccggctgacgctcattaaaccaaggctctagtagcctgttcctctcagatttcagaactaaaagaacagtctggttatcctgacttcttcttttatcataagatgctgcaagtcgaatctacagcagtcagggttaagagaaatcattaagtaataacaaagtcaggagtttcttctctgaggtaagctttgctggaaatttctcgtccctactcaagatggcaaccaaggacactttggagatagcagcttagaaatggccctgaagtgggtctttccttagactttaggtgaaaacactttcccctgatcctctggggaaacggctcccctgaggttgtctggggtttttacagagctcttctaaagaccctgggccttggggcatgctgtttaatttactgggttattggctgtcatattgaagacaaatgcatccaaggaaaaaatggctcaagaagaacagactcctccatcacttcaatcaaggggtccttcacgaacatgcttcattaacagcaaaaagggctgttggggtgctttgtccttactctacatccccctctcagctctgcaagactactgctgtcctcccagcaaaccaagcccggcagagagagaagccatcacaggaacacagttggcctcagcagcctgatgctctcaaggaatgtgttgaatcactacacagataatcagaaggcagctgctaaggttcagaagagaaacagcaggttctatcattaagtgagaagctgcccacatgaagagttgccctaggcccccgaatgtgactaaaacacagcccaagaaggccgctacagctgcaattccatgcctgtgctgaggcccctgcgtgtctagcgccactgtactcttcgactccaaggtgtaccattcatgtggaaggctatgtaaatcatgcttcttggagggaggccaggccacagccctgcaggtgggcacatcctgtatcagtccattctcatgttactgataaagacatacctaagagtgggtaatttctaaaggaaaggggatttttttttttggtgtcgttgttttttttttttttttttgacagagtctggctctgtcgcccaggctggagtgcagtggtgtaatctcagctcactgcaagctctgcctcccgggttcatgccattctcctgcctcagcctcccgagtagctgggactacaggcacctgccaccatgcctggctaattttttctattttttagtagagatggggtttcaccgtgttagccaggatggtctcaatctcatgaccttgtgatccgcccacctcggcctcccaaagtgctaggattacaggcctgagccactgtgcccggccaaggaaagaggtttaatggactcacagttccacgtggctggggaggcctcacaattatgtcagaaggcaaggaggagcaagttacatcttacatggatggcgacaggcaaagagggagagcttgtgcaaaggaactcctttttataaaaccatcagatctcgtgaggcttattcactatcatgagaacagcaaaggaaagacctgcccccacgattcaattacctctcactggatccctcccatgacacgtgggaattgtgggagctacaattcaagatgagatttgggtggggacacagccaaaccatatcacatgccttgatggccatgcagaacactcatctctctctttgctcacctataactggggcagtctgatttcagaatcatacactccatgttctcaccacatcctataagccaagttcatggaggcacacatttatgtggtgaaagtccatctctataaacgtatccatagattcctcacagagaaaaagatatgaatgctggttaaagtaataactccctcatctctggggagtatgggaaggtcctgaaagagcccctaagttatgcttgatttactgcaaaaagtgtttgctggttgagagcagacatatccctccctcaacttctctctcatgtttggagagacaacccaggtgcagttaacaagagaacctctttgcatttgcatagcactcaagcatctgcagcacagagccaatcagagccttgccttagctcctggatgcaggcaaggcttacttgcctcaggtctatgttatccaggcaaggggaagacaaggagggcagtaagagcctgctccaactgtggtccccttataaagagctctccaaaaggccccaccctccaccactctgctttacatctcactggctaacacttggtcacatgaccacactcagctgcaagaggggcatagtcttttagcactcacatcattgccagaaaaaaataatcccatctcaggaagtaagaaggtacaaacagatattggttagcagtctcttccacttggctccttttttacaggtgatgaagcacagaatgattaagaaacttgtccaagtaaacagcagaaccaggacttgaaatccaggttttcccaaccaacctccaataccctgtccactacttccttaactgaccttctgcaccactgaggtttctgcacaaatcactgccagatgctattaacaaggcagtatcctccctccctcaagcaatctcacacacatacatatgccctcctccatctccctgggctcatcaggatcacctcattttctaaaataaatctgtcacctccatcaatcatgaaaaacaattgctcaatcagctgcagtagagggggccttttcaaatcagggattggactaaactggaattgaccagcagattcatttcaatcatcaccttgacagttacaggcagacacagtcacagaggccagggttgttgaaagactcagcatgcacaagaaaagtgcttttattctctgctgcttgcatttctgtcttggctctgcagggacaataaagcagaggtcatctcctaagctgctctgagatgcccaagaatacttatgcaaagataaagtagaagagaaaaagcaatttccttcctatatttttaagttctcaggaaaacaaccacagtggagaaaatactcatctctgccagtgtgtcaaagaatgacaacggccaggcaaatgcaattggatcttatgtgttcacagtgagaaaagaacacaattaagaaaccccagcaatacctgaattcttgaggaagtgcatagacctccatttctctggcgaagctctccagagaggcccccaaaataaactaaaggctactttattcactcacttttcaaatgggtgagtgaataaagtagcctttagtttattttacacgtgtaattaaatggctcttatatctgaatggtgtcagattataaagggttctataaacaaaaagcattttgataaaggaaagtgaatttggtatatattattgtgagagaaaaagataaatgcctttacagatggaaagtctaaaaatgatggtattgaatgtgacaacggacatatattaaactagaataaataggaattaacaaacatggccaaacccctattgcttgtcaaagtcagatataagaaaatataggcataccctattgatctcaaatgtcagaatcaatggacatttgtttaacttctacttaccaacaactgtcatggatattttctcaaatgttttccatttagtgactgtttcaaatctatgagctagtcatattttgttcccattttacagatgagaaagctgaggctcaaagagattaagcaacagtcattaagggacagaggcaggggcaggtctggaatccacttgctgtgattacaagcccagtgaggtttctgtgccttgagcagttgccttttctagaacattactaatgatattcaaggcaggttgtattgctgagcagagacactggaagcttcatctaggttcaaagtttgggtgtgccactcattagctctgtgaccatggacaagtgacttccttctccaagcttcaccctcatccttaaaaaagggataatatggccaggcacagtggctcatgcctataatcccagcactttgggaggctgaggtgggtggatcatctgaggtcaggagttcaagatcagcctggccaaaatggtaaaaccccatctttactaaaactaaaaaaaattagctgggcttggtggtgtgtgcctgcaatcccagctactcaggaggctgaggcatgagaattgcttgaacccgggaggtggaggttgcagtgagccgagatggtgccactgcactccagcctgggcaacagagcgagactccacctcaaaaaaacaaaaacaaaaacaaacaaaaaaaacaaaaaaaaaaaggaagatggatgatactatatcttcaattgctattaataagtagagaatgtaggtaaaatgcctgccacatattgtttctattctattcaaatgacaaaaaaaatggtctattaaacattcattatgaaatcaggatacttggagagattcctttaaggggaattatctgctctgaatccacattgccatttgcatgcttagaccacgtagcccttcattcatttaacagaacctccttgagtacttacttgctcaatgctggaccatgctgggcactgaggtaccagagcttagaagacactgtgatcactaccctgaggaatgtgctgagggatggtgcacgaagcagggtgttgtaactttccagcctgcatctggttatgattgctgtggctctctggattctttctgccactggttgctgatttcctgtttccctctcagagcatccccctccccttcactcatgagtcccagagctcctagaaactccaatctgtgctgtcagaaccaatcctactcatcacattcctttctttgctgctgggaggctactgaagacattgatgcctatggtgcctctgatagcaggccaaatcaagggcctgatggttgccaagggtgagtccctgcctttgtgtcacctcccccatctttgtgtcacatcacttagtgcagatttcctgaacagtgtgtccttcagttcatatgaggtgcatgtggtagaataatcagaatggatctggcaacactcagacctaaccctaaggacctcataaaaggcaaatttcccagcattctctttctccatcataactttccaggactgaccagtgctctaccagttaatagcactgacagcctacatcatgtgtgaagtcctgtgctctgtactgggaacccagcagataaataagactaacagactgatatgatttggctatgtccccaaccaaatctcatcttgaactgtagttcccatagtactcacatgtcgtgggagggacccagtgggaggttattgaaccatagaggcggttacccccatgctgctgttctcatggtagtgagttctcatgaaatctgatggttttataaggggcttttcccccacttgccctacacttctccttgctgccaccatgtgaagaaggacatgtttgcttccccttccatgcttgtaagtttcctgaggcctcctaagtcctgcaaaactgtgagtcaattcaacctcttttctttataaattacctagtcttgggtatgtctttattagcagcatgagaacagactaatacacacaccttcagtcttgtatggcttacagcctatcaaggacagcatcaagtatcacagaattgagtgataataaaaagaaaaaggtagatgatcttgcaatcatcaggtgcaaattcatggcagcaggcagctaaggagtggaaggctggaggtcaaggagaagcccacagatgtgtctgatcttcacaggccagtctagttgtggaattctccctgacagcgtattaagatacacctgcattctacctttgagagtaactggaatatttttgtcataaaattattttgaactatttaaaaaatagtttcattttcaacatcacttggtttccaagaacttaataatttatcactgtctgtggtttctctaatcactttgttcctttgggaattcttgatctgcgaggaaaactaacccacagtttatcgttaagtgtaatgaaattttttgaacagtaaatttgacaatatctataaaggcatgtagacacatatgtcatagataacgaattcttgttagcttcaattattcagtattctttttacatttttgagtcaacatattgcttttccaggccgtaaaacatttccataagtcctgaaatctcctgaccacaaagtaaaataaggaaaaagggcgcagaaagggagcaggacaggacaggggaggctggagaagctcttgcagggcttcaaatggcaggaaaggtagtgacaacactcccaggatgttagaggccatggaaactatgtaaactgagggagaaatcaggctaggtttggtgttgggatgctccccattgctgtcccatagagaatgaacagcagcaaggacatgaagttggtaattagcacccaggaggagaaggctggtagaaaggtccaagaatgatgcaagaaggctctccctagcacagtgcattcaaggatgaagaaaacaaaaaacaaaaaacaaaaaacactgtcccagacaggcaggcaggcaggcaacttagggaggacctctcaaaaagctgcagtggaacaaggaagtagcaactggccacaaatgagaacatcccacaccagacatccagggccactctacccccagaacccactcattgagggcacgaaactattcaagcggatggttactacagagaggggtagggacaagcgaaagagttatctctttgcagactgcactacgtccaacacatccagacaataccagctttgctggataactatttttcctgtgtacctatcatgttctgggcaccttgaatgactctctacatatctgttcattaaagcctcacaggagcccactgagatgggtacagttattccaaatgtatagataaggaattagcccagagaagtttagtaagttgctcaggttcacacagctggtaagtagtgagatgagagtttaaatctggaaggtcatactctccttggaatatcctgtggcttcccaaagcccactaacatcagggcaagaatatcactactacccgcattgaagagaaatttatagattatatcttattgcattaatgttatatgcatttaaattcactttcccatttagtcatcacgagaccttcttcagcaatgacaattcaatggatccaatcatatcatggtgtatttgatcctatcagcaatgagacatgtaataccccttccaccctgaaaaggtccatttcaatggaccaaaaatggaaaggtatggaagtagcaaaattaaatcacatttaaaaatacatcatcatctactggaaaagaaaaaatagtaataatctgccttagaaatttgccagatctcagctgggtgcagtggctcacgcctgtaatcccagcacattgggaggccaaggcaggtggatcacttgagttcaggagttggagaccagcctggccaaacatggtgaaaccttgtctctattaaaaatacaaaaactggccgggcatggtagtgcacccctgtaatctcagctacttgggaggctgaggcaggagaatcacttgaaactgggaggcagagattgcagtgagccgagattgcaccactgcactccagcctgggtgacagagcaagactccatctttttaagaaaaaaagaaatttaccagatctcatatttataccttggttatgggtgtaaaataaaacatgagacttcaatgaatagtggcagcaaagactcctcaggccacatctgtgaatgggagagtaaaactggagaaaaaagaaacagatctaaaggataaggagggaacatgcacagtagtatggctgattgggtgtaaaggctaaggatggtgaggggtggattccaaatgactctcaggtttctgatctgggcaaacagtatgatgtttaccaaattggagtagctatttaccaaataggagtagaccattttcagcatcaacctataatgttgaggtaggtagaaaacaggtaggaaaagtagtcaggcataaggacttgaagttcagaagtggggatatattcatgtcttgttgaagtcatggaacaggtaagacatctaggaagagtttgtgtaatgaagagagaattgggcagaggacacagccctaagaaataccatcaagtgcagaaatcagagatgagaaacagtggacatatgatccttgaagcaagttctcaatgcacatgagctggatagagcttttattttaaaaataaagctgacatgcagctcacagggaggtaaaggtggaaaatctccctattgaccctggtagatgggattgttcttaggtatggaggcatggccttttcttccttaagagggagaaaagctgaggcaagataggaaagccctaaggaaaatagagggatggatgtgggagagaaaatgtcaggtgctaaaaattcagagcctgcctaagccaagcctaaaggaaagataagagcctgcaaatatttgacatgtgttaacgccagtaagggagagaatggattccgctccaaatagggggttgagacttacaagtagtgataagaaataaaagccattgattatcagctccaaacaccaaaccacttgtttgcagagttattgtctcaggaaaacagagaagaataaaggcagaatgtcaactcataatagctatagatgggcatgtccaaataaacaaagctgctcatccactgttgaaggcagggtgaaaactgacccaatttttgaagaactgtctcaaagtcttgaaaatgctcactgacccagcaaggacggttccaggaatttattccaggaaaaaatattacatatgtgcacatatattagtatctttcaggatgctgattacagcttttaaaaattaggaaaaacttacatgtctggaaatcaaagttaggatgaaatcaattgtacatctatataacagtatattaagactgtaatcaaaacaatgcctccactctctcacccccttttcacctatcatatgacactggcttttgcctgcttatatttttaatatctgttaatgccaagtcacccatcactccaacactgacaaatccaagtgatatggtttggctgtgtccccacccaaatatcatcttgaattgtagttcccataatccccatgtgtcgagggtgggaccaggtggaggtaattgaatcatgggagtggttgcccccatcctgttcttgtgatggtgagtgatttctcatgagatctgatggttttataagggttttccccctttgctccacacttctacttcctgccaccatgtgaaaaaggatgtatttacttcctgtcccaccattattgtaggtttcctgaggcctcctaagccctgtggaacagggagtcaattaaacctctttcctttacaaattgcccactgtctggtagttctttatagtagtgtgaggacggactaatacaccaaggggaccctttggagcacctcttactcaatccttcagagttggctactttctccatcctcagttttgctgttgacctgagggcatcacaacttccttgttttcctcctgcttttagttgttcgttcatggtcttcttttcaggctctttcttcacaacccaaccttatggtggtggcattccctgggattggcctctcttgtctctccacatgctttatctaggttgatggcatttattagtatggctttgtgggggggaaaaatctgtgcttcaatgaaaaactgcattgtttatagctcatgcttccttgttatcagattctgattctatgggagctgtttcccaactctggaaattgtagataactgataataatgcagaataattcttgtccatagatatgcaaatggttccatgatcaggaagagggacaaccttgctccctcaaggaaaaaaagctagttttgcttccatttgcatattcctgaagtatacagatctcttacctttgaattttcctctgtactggctgtaacacctcaccagtttcttcattaatgaattaaatgcaatcatgttcatttttacatctctgtgaggtttacctttttttttttttttaccttttcttaagaaaagtaccttgattttaccttttcttgaaaattatcttttaacagttttaagttatatctagagccaaagaacccaaatgtatgtctctatcactgacttgtacatatatctaactgattcttcttattggaagtaatgttctctaaagttgcactgaattactgaatattgaacccatggctcctaggagaaatacaaagttcagttcctgtgagcctctgctcacaatgcttttgtcaaatgattaatatagaaccttgtttatgtacataaccttgttctgtgtgtttctgtttaaagacagcttacttaacagattttgtcaattcattaacattgaactgacagccagcagccctgtaactcaggcctgaacaaagctcatttaatatacctattttctctgcaaagcacatcacagccttcttgcgcttaggaacatcagatgacacttcagcactacacttgggggccacttaaagcagcaaaatcaccaacagcacaaaaatgtgaaaaacataacactaaataaaccatgaaaagcacactcgtttacagtaggggagctgaaacaagaaggcagagtgctacctctgaccccagctagtaatatgtgcactgggcaaccaaaagttttcactgttccgtgcaggtctgtgaatgactgggagagaaccaagagtactgatgttggtgttacaaataaattttagtgagtagataaacttgcaaatatgaaatctgcaaataatgaaaactgtatttctgtatctatattaaatgtaatgtatgtctcccccattagtattcaggatccataaaaactaagaccatatctattcaattctattatatattattcaatttaatatttgcatttattgaagtaaaaaggtacttgagtacatagaaaaatattcattatacattgttttaaagtgtgttactcaacaacatttacatattagctcagttttgtccagggagatatatctgtctgtattaagaaaagtaaaccctaatggaaagaaatgtctcaaaattttgtataatctccatgtggtggggttcatggtttctttttacatccttttttagtgtttttctgtatcttccaaaataaaataatgaaaacatatttttttcatcattgctacgaaatgccattaagacgtgaatacctgccttaacttttccactatatacagcagaagtttgaacagctccaggcaccaggaactctctaactctcaaaaaaaacatctgggtcagcacctccagcctgctcatatgacagctttaatagctcatccccatagggcctggtgctctcctaggtaatatctttcatctatctttggaatatgtggccagaattaaatgtcatggtcttgggatattttgtgtgacatattacaggcatcccactgcacactcagtctgaaccctaaactcccataatacagaataccgttaccttgatagccacacctaattaagaatgtacactcatccactcttcaaactaccagatgcgccagccagacacagaggtctgtcctcagggagttagagtctaatctattcaagacagtgggatggtctttcccagcctgtgggaggtctttagatgtctaagctgccatggctttggtcaaatgctttggggtgggtgcggggaaagtcaaatccatgtaccaactataaaaggtaattaagggttatgttattgacttcttccttctaagggatattcctctgggctcaattttattgtgtttagttcatatacagtcctatataaaatagtgtgggtcaagtttaaatggattcgctgcttaaccttcaaataaaaaaaattcaattaatcagagctcttgcctcctccatcccatcgccaccacctttcccccatgctgtctggttaatccaagattcacagcacatagaaaccttctgtagtgaacagacggcaggagtcaggtgagtctggggtcaggagatgctatttcacagctattacgagatttgagatttggggaaaattactttactcctcagagcctcagtgtccctgtgtaaaatgacagtgatcatctgaattaagtcgcagggaaactgtgaggaccaatagaaattgtgcttataaagggctctaggaagattgtactgtaaaggctatgcaagagcaggtggtgctggccacgtggaaggggctggagctttcctcccaaaataaatttccctaacagggtgtctgctccaccattatgtctacaagttcagaagatttgtaaatatggcacccactctgataggttctcttacagctgtgaagcttctttgggtcaggctctaagcttccatcccttctccctcccaagaaactcccatactctccctccccagtccatcactgtttggggtattgtaagcttattccagcaacggtgctggaataataggttaaatactgaaaaacaaagttgaaacttccctttataccaaagaccaaaacaaaccctctattagttaatgagctaaatataagacatgaaaccattaaaaaagccaacttggtaacagttgttatcactgagtgatgctttgttggattcttttcattgttgtgtgtatatttttatgattttccaacttttctccagtgcacacatttgtctccacaacattcattcatgcatgcaacacctatttattgcatccctccaggtgccatccatgattccaggcactggtgaccagaacagacaaggtaacgatccctggggagtatatagtctaatggaaagggcaagtaataaacaaatacacacacagataagtagacaactatgaattagggtaagtttggtaaacagtgttttttgtttgtttgtttgtttttattttttcttgagacagagtctcactttgtcgtccaggctggagggcagtggcatgatgtcggctcactgcaacctctgcctcctgggtttaagtgattctcctgcctcagcctcccaagtagctgggactacagacgcatgccaccacgcccgtctaatttttgcattttagtagagatcgggtttcaccatattggccagcctggtctagaactcctgaccttgtgatccacctgccccagactcccaaagtgctggtattacaggtgtgagccaccgcacccagccgtaaacagtgttttaaatggttaaaatggagagtgaggaggaggaagctagaccaacaaggtcctttgcgaagtgacttttaaagggacatgtaaagggcaatgatgagttaactagttcacacaaaacttttctgtaaaatatttattttatgctgtagagtgaccaatgagactaaagggcatatggagcatgattacatgagaatgaggtcagtgactaaaagggaatagacacaagcaaaaaatatatatttaattggaatatgaaatacatttcctattttcaaaaggttactttcaaatttcaaaaatgtgctacctctttttttcaagtataaagatgaagaagataaagaagtaaaatggcagccaccaccagagtagttatagtggctgcatccattttccgccctaagcccaggtgggaaaagggttggctggaaaagttacaagcttctaatgattaagaagccccatcaaggaaaatctacatggccgtggtggatggacaaccactctctggtggattcccattgaccttcgagaccccctaactcccactctcacctcctgctacacctcatctcaagaatctcaggatgacttgtggctcaagccaatagtgggtgggatttagaaacaactgacactctggttttcctcttttctgtcaggcagagtctttttctctgcaccaagccaggtttgggctcactgctcaggataactctcccattcttctcactgcagggagacctctgcgttccagaatggccagcaatggacagggtgcccttggcttcctctggctcaggcatcattttggctgaggctgcataccaagctcttgatagagtgagctttgtgaacacagcaaagggctagcccctcagactcatggcaatgaggatttttggggtttaatggtgaggaaggcctagggcctaggtaatgagagagaaactgaaaaaagatagcatactgtcctcttaatatgttgtaccagttaactcacctgcagaaatgcctgttaagagcctacttcgttccttgccaaaactggttactaccagtttgaaacatataagtaggtaatatattgataatgagagagaaagtgagcccctaggtgttaaagtaccaaaggctccaatttactaagcacctactaagttctaagcattgtacttagagttctatggtcagctgggtccagagcaggactctaatcggactcagtaggccccaacctcagctacttcctaaactgtgtgacttggagcaaaacactaaatctctctggccttggtagtaatggtcatgataaaacctacctcatggggttataggtttgcaggcaaagtcagtggggtaagccttgcagagcattattagccatcattaatattaatgacctgtatttctatccagtgaggtaagcagcattatactaattaacagagggggaaactgattcacagaggtcaagcaattgcccaaggctgtccagcatcctaaggagtgaatctagcattaaaactctgatgggactgaaagcaaaccccctatttaactgtcccttactctatttgaacactgagcttgaagcttggtttgcatctcagggcttagcaaatttgggactgtttctgtactgtccaaaaatgtcaatgattcactaactaataaaaataccctcatatagagtgttttacaatttataacaatcattcacattcacatttgactccaatgggtacaacaatttctaaattatataaatttttgtgacccacagtctcaatacctgaatatatgtgtgtgtgtgtgtgtgtgtatgtgtgtgtgtatttatatatatacatgaatatatatacataatatacagacatatatatggcatgtctgtctctgtacctatacccaagggcagataggttaaaatacatattttaagaagggttgtttccattcaaagaaacactttgatctcagaatgagccgccctcccccaaccccacttaatgttcagttcagtgcaaaagatgtacaaagaggggcctggaaatagagtctagagaaagttgaactgctctaggaacttgaatgagaagactttgctgcacctgtgggcaatttgggagggaggaaacagaaagaggtgaaaatttcttgcctgttgaaaggacttttaaagtctgagaaaggatgagttctatgctgggcaggacggcaatgcgaccccttgcctgagtcccaccaaacaccaagagaagtttgctgctgcaggaaacagcctttgttatgtggcttcggcagggtggtgtggaagggcccaggtccacatttggttcagttaggggagccagaagaatttgactgatgttctagaatccagggcaggcagtgaacaggggctcatgtgctctttttgaaatctccatgtgcagaatttgaaatggggagttctggtcaatacttcatagatttcactggtaaactggccccagctgatatgcggtctgtgtatttatatttcacaaaactgacacagtaattacttacactcgtggttttgtaggctcttttttttaaaacttcctacagcatgaacattaacccatgccattagatacatataccacaaaaacagtttgtaacaatactagcatagaattccactgtgtgtgtgcaccaaaatttacttaactactctccaatcgttggtgcatttaagtgatttccaagtctttgtccttataaataatgcagtgatgatctctgtctgaaactctcttttgagcagctctgattattttgctagaaaaaaaattagcaaattgtcctcttaacatgctgtaccagttaacttacctgcagaaatgcctgtaagaacctgctttgttattccttaccaatactgcttattaacaatttaaaaaatatataggtaggtaatatgatagataaaatgcatttatttgatcatctgtaacactggacatttttaatacgctttttgctattcatattttgtttagcaattacctctttatgcctttagcctttttttctatcaatgtgattacattttaaagttagagctttttatgtgtaaagatattttatctcccttttctcagttttgtcacatgttttcccacaccagtttactaacctgctttttgattttagttaacatggcatagaagatttttctttttcttgtctttctatgtagtaaaatgtgtaaaccatgacctcaatggtgtatttgcttgcttttaatgaactgagagtctctcccaataaaagaatgatattttctttatttttttctagttttgccttttaagtttttaaactacccataatttaattagcacatggtaatatatgcaataaattctattttttacaaagtatcttaccatgtacaatttattaatcatgtactatttgataagcaattttcaattcatataaattttttatttttgtaaagctggggtcctgctatgttgcccaggctggtcttgaactcctgggctcaagtgatccttctgccctggcctcccaaagtgtcatataaattttaaaagtcaccagtggaacagaacagagccctcagaaataatgccacatatctacaactatctgatctttgacaaacctgacaaaaacaagaaatggggaaatgactccctatttaataaatggttttgggaaaaccgggtagccatatgtagaaagctgaaactggatcccctccttacacgccttacacaaaaattaattcaagatggattaaagacttaaatgttagatctaaaaccacaaaaaccctagaagaaaacctaggcaataccattcaggacataggcatgggcaaggacttcatgtctaaaacaccaaaagcaatggcaacaaaagccaaaattgacaaatgggatctaattaaactaaagagcttctgcacagcaaaagaaactaccatcagagtgaacaggcaacctacagaatgggagaaaatttttgcaatctactcatctgacaaagggctaatatccagaatctacaatgaactcaaacaaatttacaagaaaaaaacaaccccatcaaaagtgggcaaaggatatgaacagacacttctcaaaagaagacatttatgcagccaaaagatgtgaaaaaatgctcatcatcactggccatcagagaaatgcaaatcaaaaccacaatgagataccatctcacaccagttagaatggcaatcattaaaaagtcaggaaacaacaggtgctggagaggatgtggagaaataggaacacttttacactgttggtgggactgtaaactagttcaaccattgtggaagacagtgtggcgattcctcagggatctagaactggaaataccatttgacccagccatccaattactgggtatatacccaaaggattataaaacatgctgctataaagacacatgcacatgtatgtttattgcggcactaatcacaatagcacagacttggaaccaacccaaatgtccaacagtgatagactggattaagaaaatgtggcacatatacaccatggaatactatgcagccataaaaaatgatgagttcctgtcctttgtagggacatggatgaagctgaaaatcatcattctcagcaaactctcgcaaggacaaaaaaccaaacaccacatgttctcactcataggtgggaattgaacaatgagaacacatggacacaggagggggaacatcacacaccagggcctgttgtggggtggggggagggggagggatagcattaggagatatacctaatgttaaatgacgagttaatgggtgcagcacaccaacatggcacatgtatacatatgtaacaaacctgcacgttgtgcacatgtaccgtaaaacttaaagtataataaaaaaataaaaataaaaaataaaggctgaaagaaagaagaaaataaaataaaattagttatgtaacatctcatcataagttgtttataagaccaatcacacaggacctgttatgaaaattccatacttgtaaagtgctacccagagcctgacacgtggttggcactctatatgtatgagtttcttttaaatttatttgggatatttgaatgcctatttatttttgtgaaagggtttatgtttcaaaaattaaaaaaatatactttcattcatgcatcaaaaaaaaattttaaagtcagttttgctatgtactgtattcatttctgggctttaattattatagtttttacaaatgttgacatttcacagagaaaccctccaatcactttttctaagtgctcttgacttctttctcctgtattttctttcagatcaacttttaaatcactttaagtttcaaaatgaatcccattaagattttgattagaactgtattaaacccatcaattaatttgggaaggattgctatcctcacaatattaaatttgctaatccaacaacatgacatatggccatttgttcaggtcttgttttctcatcctcaataaaactttgtaggtgtttgtattttcatatacatgctgcacaattcttagcttacacttaagtgtttatactgtaattacatttaagaataggatacattttattatagttttataatggttattactggcatatggctatttatttttgtttatttgctttgtgtctgaccatagcattgaaatcttttagtagttccaatagcttgttttttcagttaagtttattctcttaggcattgaggctataagaacgttttcttctggaaataagaaggtgcctttccatttctagcttactaagaattctgatcagtaatgaaggctgaatcttttcaaattactttttagcctctcttgagaggctcagatgatttttattttttggcctactaatatgaggcattacatccatagtttttctaatattcaacatttttcatcagtgtattcctggaaaacacccaactgggccatggtgcattatgcattgataatgattctggatttcaggagctagagctttgcagctgtgcagttaagggttccattttcatccgggccatttgagcaagtgtgtggccttgggcaagtcacctacctcctagacagtgagtggaggaattatacctccctcacaagcttgctgcaagaattacaagtaaaatattcaaaacaagctcaacactataagccttgcatacagtagatacccctcaaattggcagccactgttttcatcactataatcatacactttctttacattgtcatctcaagtgtgacagagctgtaagagtgattgaactctaattttaatatatttgggatgctattttttaaaaatccagagagcttgataaacactgttagcttttactatctttaatgcttctctgtgactcactttttcttcaaatttcaaccctgaaatttagaagaagttgagggattacttgttgacttactattgtaactgaataaagatttagttgcttgctgcttgcggagttcaattaacaagagcaagatctggtagaaagaaaagtgactttattccagagctagctgaagggcagtagtgcagtctccttcctcagggtgccactttgcttccaggcagaaagcagaggcttttaaaggaaggcttggagtgaagggcacgcaggggagagggcgaggaagtgcagggtctatgtgacttttcagatttcttatctatccggaggtctcactagtgccatcatgggcagagtgaggttgtaaatggtggcaatctcctattgggatagaattctggatgtgcctggtttgcttcaagtttcagtctctggaacttctaagtaacacatagttagacagacttgctgtgttggaagtgtctggtggagagaaggtaaagattatactttcattcctaaacagctaagtaggtggtggggggaaagaaaaaaagttaaacaattgattttttcccttttaaaaacgaggtgctaagttacactattgcacttcatcttctaggaggccctggctccctaaggagcatggagtggcagaaaaatctaaaagtgcaactggatgtctaatagggcttttcctgttgctttggaattttatctaagactacaaaaccaataagcatacaaaataaacactgccaccttctacagagaagacctgagggacttccagctatttcttccagagaacactaagaggttcccaagcggactctcactcttccctcccagcactacagtcagctcatacaataatgagacttcatgggttaggggaagtgagtctctgggattatgaattataggtttaaagagagagagctttatgttttgcctctttcttaagccaagggagagggactccaatggtgccaacagtagacatcgtgcgacagtgggaggggagagagggtctgcaagaagaggagatgaacatcttatgccctcacaggtgcttgtccgtctgcggataattctttttttttttttaaggcggagtctcgctctgtcgtccaggctggagtacagtggcacaatctcggctcactgcaagctccgcctcctgggttcacgccattctcctgcctcagcctcccgagtagctgggactacaggcgcccgccaccacgcccagctaatttttttttttttttttttttttttgtatttttagtagagatggggtttcactgtgttggccaggatggtctcgatctcctgacctcatgatccgcccgcctcggcctcccaaagtgctgggattacaggcgtgagtcaccacgccgtgcccagataattcttatggcgtctcaatcagaggctccataaccgagtatgatcagagcaggttttctcccttctttagctttcatctctcttccgtggtcctacaacccagaggaagcagagagtgcagcagcagcaaaacaagttcggtaggtgatgcaagaactgccagaaccctttctccacatctttttgaggaagtgctggtcataatccatcttctgtgactgccttcaatctaggttcacctgcactgcacaagcaactatgtcccttcgagcatggtgtggcatgcatgaaagtcccctccttccctagatcctcatggtcttgaaaatttctccattggtctttagaatccattaactctatggctttgattctgggtgggatagtgagtccattttcatttctactggctactgtttccatgttccccgaagatttatggatcatctcaccagaattacagtacagcagagatggaggttagatgtctgtgttcatactaccctcctgcccagaaggatgtcccattttacttctaattcagaaccctaagagttaggccaagttatgttcctcccattttatagatggtgccgccaaggcatagagaaatgaagaagaaaaactcacgagactagttaagtgatgctgttctattttctagaccttcaattacctctttttataattctctgcctctactctgtcctagaactgcatgttgccctgaaagacccttgcctgtgggacccacaggcttttcagagaacacagagaccacctgaggctgcttattgcagagagtctggattcacttccaatccctttttgctctgggcttgaaaggcctcattcttacaagccttggcctcctcaaagagagaagcatctgcgtaacatggttctccctcttacctgagactagagacaattataaaaaggacaattcccatcccccttaccccgtgccctatatcatgaaataccctcacagctacacgtcgaggactccacaacatgcacacagccacatgtcttaccttctcagcagtgatcagagcttgttgctaaaccaccactgtctaagaaagtacacagagtagcagctagagaaatccttcttaaaacagggtccatcatgctacagtgaaggaaatcaggttctgacatcctttccccaggcctaagatttatttctaaataatgtttattaaagggcccctaagttcccggttctctgcaaggcatataacttatctcactgaagctttccaacaaaatggtgcattataatatcccttagatggaagaaaataaattgagtcacagagagatggtgtaacacatcccggtcacccagccagcaagtgcccagcttgaaataaaaaccagattatttttggctctaaagcctctatccttttcattcaattctaatgactactctcacttcattgagcccagcaatttgaatttatcttttttatccccctggagaaaagagagaggtagacacatatcactgcaagtagaaatccataaatatgtaaataaaatagaacatgcaatcaaccctcaggtggagggaataggaagagagccctccaaatcaacagcgtatgtggtgtctctggctgtacaaagccacttttcacttggagagctgggactccgcaagactacaatgaagtgggttcccaggcaaggggcctttgattgacacgcaagggggacgggctaagattacgtgacttgctggattgttgatttgtgattctgtaactataatcggagtggcctggggtctgcgtcaagcgaagtttggggggataaaagaaagcaatgtctggggattaagtgagacaactgagtggctgaagacctgtttttgagatgaggaggaaaacctgggagcaaaacttacaagtgggtgtttcaaggaggcctatttgagggtaacaatgaggaagagcttcttctatctaatgctagatgatagtcttaagacaccaacaagctggtacccaagccattgaaagtggtacctgcaggagaggtacagggccaagttggacccatgtggtgtccctatctcttgtcacctcacctgctttctccagttactgacctcggcatccactgcccttggttctcactgtggactcccaatagttaatgctagcagcctgcctactgcccccactcttttaaacctaatggacactctgtgtataatccatccagagctgtacgataaccaagctaacactggatagaggataatagtcaccacccgagatctccagcagtgaaatggtctgccatggaagagtgtaaacttcccatcagaggcagcattcaaggtgaggctgggtgggcaacacacagcaattctaagacccaactcctatcacagaaagtctgctgttggggatgtgctggaggaaaccacacaatgctctagacaagagagtctctgagatcccagaccacagcatgaactctgaaatgggattttccaggagatgatgaacaacaaaagaatatgggtccaccttcaagatgccaattagttctgagaagtggacaaggaagacttcctgttttgatataattattcataatcatagcatccataacaatagcagcaaccaataacactttggttcactataggcagctaaagaacattttgagtttgatatacatgatcgcatttgctctcatacctatatctcatgaaagatggtgaatgattaaactaaggaaaagaaacaaaatgataaataaaaatataagaaatggattatctcaacagaacagcatgaagacacagacttaaattgctttcatcagtactaagaagtccctttgatcctaaagtccaagtgaaatcaggtagtccgcatggaagaggcagttatctgctgatctctcctgagctccagatttatatattcccatcacctgctatacatcttcacctccaacacaacatattcagacctgagctcatttccttttgtgtttttcggctcagaaaattgtttcaccactgtgatggttaataatgagtgtcaacttgattggattgaaggatgcaaagcattgttcctgggtatgtctgtgagggtgttgccaaagaagattaacatttgagtcagtggactgggaaaggcagacccaccctcaatctgggtgaacacaatctaatcagctgccagcatggccagaataaaagcaggcagaacatgtaaagactagactggcttagtctactggcctacatctttctcccatattggatgcttcctgtccttgtacatcagactccaagttcttcagctttgggactcggactggcttcctttctccacagtttgtagacagcctagacctcaccttgtgatcgtgtgagtcaatactccttaataaactttcctttatagatacatctgtcctattagttctgtccctataaagaaccctgactaatacaaccactcatctctcagccatctaaactgaagcatgggagtatcacctttgactccctactcccaaccccacatccctcgattcctatctgatcatctgtacagtttctggtttaactggctgggagtcttgctctgaactccagcctactgggctgggatgctgcgctacaggcaaacacttgacaatctcccccttaagggttaaggaggaggtatcctttgggttaagggaaggatagccttcccttagtaccccagaattttcttaatcagtgacctctcaaaactggcagagccagaatgcatccccacctgccttagctgaattgcctctctagcatcttcttgtgctacgcccaagcttgtagcctactgctgccaagtctctgcctgctactagcatgtccttactaagccaacctctgccaccagtgcctagcacagaatttggcacaaagaaaagactaagtaaatgtttgatagaaaggagtgaaacttttgtgtagtagttattcattctcagctgatctccatagtcaccaacctccttactacccaatgccactctcaagaggacacttgtgggcagaggaggtccccagggctgaagactccatcaagtcctgtggtgaagagtttctctggccaagagacctagcatttaaccgattggtgaccttcatccaactattctgagtctcagttttcctcccatctacatctcagagctgctgcaaagaccaagctatggaatgaacatccttccaaagagccatgttggcttgtcactatacataagttagtgtaaaacttgggtatgaaatgacatcactcagtggaatccttacagcaaatttctaggctcaaccccagaatttctgatttattacgtcgggggacaggtctgagaatgtgcatttctaacaagttcccaggggaatatttgtcttaatccatctaggttgcagtaacagaataccatagactgggtaacttataaacaacagaaatttactttttatagttctgagggctggaaagtccaatatcaaggtgccagcagattaagtgtctagtgagggcccatttcctgggtcctcacatggcagaagacatgaaggagcattttggggcctcttttgtaagggcattgatctcattcatcagtattctgccctgatgacataattagtacccaaatgccccacctcctaatatcatcatttcgagggttagaatttcaacatatgaattttaaaggaacacaagtattcagtctatagcaatactgatgctgctggtcgagggaccacactttgagaaccaccgcccaagatgattctaagaccatttctctttccatgctgacgctgtttttcctccatgaagcatgctatttcaatgcttgcctttatgttttacctttttttgctgttttgttggaatcctaacccagcctgtaaattcctctgggcagaaattataccttccactctacatactctctcactttctgttttgtaaaataatgagtacatttccagcgtgattaataatagaataggaaaaggaggaaaatctcagactaccaacaccaataaacaccacctacaaatagataccagccctggaattctcttaaaaattaattacgaggcaaaaaacattccaccatcagtggcgatgcaggaaggaagattatcttcttgatgacacattttgtaaaatgtgaattattcaagattttagctgtaacttaaacaccaacgttttttaaaaataaaataccacaattgcattccaactcataatttttatattgatagccagattattgtgttttcaacatgtaaaatccattacacagtcatggcaacagtttgcaatagactgtaaatctttattgagatgatcatcttgcgattgaatttcaaaatgtattatatgatcatcagcaaataagtccacgggggctgctaaagtactttgaatatcatttataaagatcaaaaaccctggaaactcttacatttaccctgtggaaagagagaagtctcatcagcaggatcaaatcaattatttttatggatgaatattgcattgcaaagctgagataaggtattacccagtttagtaacatatcattatgtccttttaaagtagtaagtttcataatcaggtttcaatgaggaattttaccaaaggcctgttttgaaaataatcaagaaaatggcatctctgttcagcatagtggttcaataaccttacaaggaatatttccaagcaacaaaaatacctgggttacatactaccacgatacaccactgagatacttaagaatggttacagctaattccactacaactcttgctttgaaaacgcaaatttgttccaacccaattaatatatgaaagggcaatttgagcacaacacgaattctgcatttgcttatgtgtgattttgtatgtgagaaacattagtgaaggagaaacctgcacccagcagaactgagccacctacgaatacatgcaacacacacagttccaacccctacctggcccgtcagctcactgcctgtgttctgagccacacctttttccccaatttcagacagctttccttccaccacttcacagtcactcacaggctgcaagtcactcacaggctgcaacttccctgatgcccacttccacagcaaacttcaggtctttttcaaggtaacataccatctgtgttgagcatcccttatccaaaatgcttgggaccagaagcgtttcagatttcagattttcttgaatttcagaatatttgcctatacctaatacgatatcttggggatgggacccaagtccaaacacaaaattcatttatgttttatatatatcgtaggcaatcttacataatattttaaataatgttgtgcatgaaccaagtttttgtatgtcgaaccatcagaaagcagaggtgtaattatcttagccacttacgtggacaactctgtgcttgtctgtcatcaccataattcctgactccaaatgtatatgctatcgataagcaatcatcttcttaagcttattcacacataagtgcttaacagtaaaaaagaataaatgatatgtcattaatactgtgaaatattaatgtgttcaggttaactgagcagcacagtagactcagcagatacctggatcagctggtgaatgtcagcaacaaacatcctggctttcagtcctctccctgtgatgttgtgctttgatgaagggttcctatacaccacattttattttcttaggtgagaacaaacatcagaagcagttgaggaaccaggaagtggatcctctagggataaagaggcattctgctggatggcttttaaaaatgtttcctccagagtcatctgcctcattaacaatgatttttgtcttagacgtctctgattttataaattgacctggtttcctgttctgctatgaatgcatactgctccagtccttccataagctcatcaccaatgcttgccatgtcatctacaggcactttttctgcagtgttaacaatgtcatcttcattggtggtatcgtgttggcactcagtaagtttcagattctggagcattttggatttccgaggttcaggttaggaatattccacctggatggatgcatttcttagccatttcacgtgcataaaattgtgccaccagttttactagattcccctcttttttgatgtgtcactaaggaagtatgaatatggcccctagccccattttttccataatccctgtggttttcatttcgtaacttgacatagtgtggtgatttttaggcacctatatgtcaagtcatggcagagctgtatgcactttcccttgctgtttgttccatggttcctgtactgatgggtccttcccctccacccagatgccctcagtgactcctctttgttttctgaaacccatgctgcctgctcccctgagccacacccgcctccactagaacatccccagctgtatatacaatgctctctctctctctctctctctctcttttattcatcatgatgtggccaaaagtcaaaagctgagagtcagaaaatctaagtgtaattcctgaccgtaccactggccattctatgactttggacaaaaagtttaaaagtattgagtctctattcctttgtgcatatataaaatgtaagtacttacagcaaaagtttacttggtgtgaaaaaaagatataacataaataaggtaatttgcaacaaataaagagcaagttagtttaatttcttgagttgcatccagagccagatcatctcagaggtacagtgagacacatgttgttagccaatagcccctgattagaaatgcagtagaagccaggaggcctgggacacagttggatccagagaatctctcccctcttagacacaatctcagccagcaaactcttacatggcatccaggaatatcagagagacaggtgtagtcagtaacccatagagatagagtggaatccagaggaccttcagaggaatagtcccaacccagactcttaggtagggataggagcctccaggggatacagaggcaggaagctcttagggactaaggtagttccagaaacaattcagagatactgtcagagccaggaggcatttaagacatggttggcaacagaagcccctcggagacaattctagaaccaggagccatcaagaaaattttcaaaaccaagggtcacaggcccagctcagggagcctcaggaacaatgttagaattagaaactcattaaagatacaaccaaaaccagaagcccccaaggacatagtctaaatgaagcgttcacggggcacagtgagagccaggagccctcagagacacaaccagagccaggagccctcagagaaacagagccaggaaccctcagagaaacacggccagggcccccagagacaaaaccaagagccctcggagaaattattagcattagaaagcctcagacatacaaatggcaccaggagttctggaagacacagagccagtgtgtctcatcagaaacactattagatccaggaacctcccgtgacccagctaaagtcaggaagttcttagaatcacagtcagagctagaaagcccctagaaatgcaaccacagcaagaaggtcctctaaaaaacaaacaaacaaaaaaaaccccaaggccttgatcctgtttatccacaataggaagcacattcacattcaaagaaaattcggaattatctgtcacaggaaggcaagaggaaagccagtcttggcaatagcacagcctctcataatggagcctgggaaaaaaaaaaatcttacctgcacacttggtcctggtggtgaggggaggccctggcggtcccgtacccccctcacctggtcgtgtgaggagcactcggatctcatactcaacatcggggtccagatgccacagcttatagttgggagagtcgactatgtgggtctctgcccacgtgcctgtggtggtgcgatattccacttccttcaggatgatggggccatccccgatgatggagttggcatttggcttgatccacaggtatgtggcccccacagccagcagctctgggggagcaatgggcgtgggaggctctgtaagacaagcaatcaaaaaggactgtcagattcaaatgatttacagagcagactacaagcacatgacgacaagggacagaattcttgatgtagccacaaaaaaaatagtcagaaacccctttttgttttattttattatttttattttatatttttgagatggagtcttgctctgtcattcaggctggagtgcagtggggccatttcggctcactgcaacctctgcctccctggttcaagcaattctcatgcctcagcctcccaagtagctgggattacaggcacctgccaccacggctggttaatttttgtatttgtagtgcagatggggtttcaccatgttggccaggctggtcttgaactccagaccacctgaggtgatccgctggcctcagcctcccaaagtgctgggattacaggcatgagccaacacgcctggcctgaaaacccttttaaatcccattcatgccctactttaagggtttgcatgtaagtacctgaatcagtatttcttcaatagctatattcaatgcctaccttatctccttcatttaaagaaatgaaagaaagaaggccatgtgaggaaatggttttcccagaacacagcaaagctgctgggtgaatactctgttttctagcctcaaaggaaaacctgcttttgctgaagtaaagtttggcacaaaaccaggggagcctgaggtctataaacatttcttacatagaacacacagattgttagtgaagttctttccaaaaagtgatatgagcctaagtagaaaaagaatgatggcacagcaagaattcagcttctgcctcaaccccagcaggtttcttccagcagagaaagtcatgggtcacagcagacccagcaggaatgaggggttaaaggaaaagttgtgctgagttatcgtgcatctactctgtgctgccacctctcttccactgagttccacgcagtcagctaagtagaccagaggttcagcaggcttggattgtagcctcttccttgcaattattagcccatggcaaagctacaaaaattaacacttaccttgtacttcttatgtactttaaaatctcacacgtatcattcatgtaattcttgggacagcattatcaccttaactttaatggggaaaaaaaaaaaaactgacaacctaagaaatcaggtcacctaaccaaggtcatggagaaggtagtgtaggataaaacttatatccgcatgccttcctggaccaacttgcaccaaggaaagctgtctgcctcttaatactcatctttaaaaaaatcaaactgaatatatttgttatttttatttgcagtaaaaatggcagaacaataaagaaaatggaagaaagagaaaatatgagaagaaatggaagaaaatggagaaaaatggaagaaagagaaaatatctctaacatccaacatagccatttttattcttccatgtccattccaatatttatgtactgacacattttttgtgttgttataataacacatagacccaatgtagattcatttttcttccttcacttatattgtaaggattttttttttcatatactgcttgagctttatcatcattgtctttaatatttgcataacaatccatcaggttatcacactaactattctctgattgctggacccatgagttgttcatgttttgctatggtaaataatgctgcaatgaacatctttgtgcaaagacttcagtctgtcttatctcatgttttcttagaaccaactgcgaggaatgggattatatgtcaaagggtatgaacaagaggaaatgaagagtagaacaaggaagaggagaaagggcaggcacagaggaggcatatgagggtagaatacaatgtgcatttgtttgagaatatttcacttatagagggcctctgggttattcacatggatagaaggcaggtatacattttagcttggaactcaggtaagggctttgagatagagacgcactaagcatttcccttccaattaattacctagaagcaaagattctctagaaacagaataattgctatgaaacaggggtggacaatattttctcagtgtgactcgaagcaaatcttaagggacaactccagattgcctctattatagcctgccatttggtcagagaaggaaattaagcagattagtcaagctagatgcttttctttacaaagccatggaggttattactcaagaccttgttatctcaaaggtgtttgcaaattgatttttggataatttgttccaggtagagaagctaggttggcaggcagataatttctaagctcatcctttgtgcatgttaaatatatggaacctttgattgccattatcaactctccagagctcccatcagtctccaatgaggccccaggggtgatattttgcagctctgtgatgactctgcccaattccttaatataattattcacagactagacctctacagaattaagagttgcagacttcaatagtttggaggctgagtgagtggccccatttagttcttttccattgacttttcaccatggttttctgctctcctatttcagacagcagtattcaattgctgaccaccagaaagaaaataaagtattaaatctttccaaatggttagcttcttttcatgtatttctaatggcatgtgcaagtatagtaacaaacatccccttgagtatataaatgtccctatctcaaatgacttgcgacttcacacatttgtgtgcagattagcctcacggttatctctctctccatcccctcaagagtagaccatgtaagtttatcacggtgtttcctctatctggcaccaaggaagccatcagattattgtgtgctttattctttcttttttcagtgatccattgattcataattggcattgtttagaaggcacaggtactggtggttcaaagagagagaagcaaaaatatagcacagaatgtttttggtaagcagcacattattttaaaaatacatagacaaaccctatctatttatagcagttctctatctctaagatgaactcttcaagaagacagtataggaaatgtacagggccatccagtccaatggctagagtcagcagggaggaaaaggaaacccctgtgtatctcatttgccagacagagcactgagcgcatgaaatttaatgcagccaagtaaatcagtgataacaaagtgtagtaaagtcatgatgcgggtggcagaggcagttttgaagcctgtgaaaggacccaatctggtctagaggttagggaagctcttgcagagagcacttaggggagtgttctgctgggaccactcatgttgagtctatgaacaaagaaaaattcctgggggtcccctagttctcagttgcttgggctacactggtcaacaattcaaacgatgtgccctggacactcattcattcactcgttctatgaatgttgagtccctgctgctggtcacacactgtcctaggcacagacacaatcttggctgcatggagctccccttccagccttcactcgaggattgacaaagagaagtcaggagagaaggaagctgactcagaagctgttgagaaggagggcattcgagaatagagaggccctgggagccagacctaggtaagagcttatggatccataaagggatacacatatacacaatggaacgctgctcagcaagaaatgaacaagctgcagacacagacacacacaacaacatgagtaaatctcaaaaaaattcatgcaaaagaaaaataaaagaatgcatgatgaccccacttatgtgaaaagttcaagaacaagaaaaactgctctatggtgataaaagccagaagcatagtgacctgaggggcaggtactgaccgggacagagcctgagggaagtttctgggatgttagaatgttctctatatattgatttgggtaattaaataacagaaatcaaaatagtgttactataagggagatgactgcctgaaagaaggcataagaaaaatttgggaggttataaccatttctgtatcttaactggggttatgtaaaactcattaaactgtgaactttaaacagaagtatttttatgcatataagtgataccttaaaagttaaaaaaaacaaaaatatggatatgtgactcactggatgaagagaatgccactaattacctgaaagggaacctcagaaaattgggagaaaatgagcctttactcctataccattccctcttatcagcaccatcagatgcttgaattcctaacagtttttcaaacaagaggttgttcaggcacacaccagtttcttatccatgaggcttttcacttctaacacaaccaatgccctcttaacagactccacaccatcatctgtgcaaagccaggagtaagtgtttaacatctgacagcaccctctgctcacaaagtttgcaactaaattaaggaggaggaagtcttgccttcatggagctgagggctgagctgggagatgacatcagtgccttccagccaggcatcaaagcgctgcgaggacaaggatgccaggagccatccatgagacctgggcagcagcggccctgagcttccaaggctctccttcaacatgtagatggtgaagtgaccccttcctgtaattctgccacatcctcaggcatcaatctccagaacaattctgtctttcttttccctgctgtgagcacttgtaacagtttgactccctagaaattcctacagagagtaaaagtgtttcaaatagctggagatggagctgtgcgcatgtactgtctgctctagatagaaatcaaacgttttgagaaaaaccaaacgttactaagacgtgaagtgagccttgatatgattaaggtgagtgtaacctagcctccaacactttacaccacacgtctcaccccacctgatcacccttttaactgcattttctattcactgaccctccaggtctgtgggaatgcctccacccacccaaccctagccaccaacacaaacacattcatacacagacagaaacacggttgtgccattctcatttccagacttttgtctgtgccatttttcccaactagaatggctttccttttacttgttttttttgttttgttttgttttgttttgagacagagtctcaccctgtcacccaggctggagtgcagtggtgcaatctcggctcactgaaacctccaactcttgggttcaagcgattttcctgcctcagtctcccaagtagctgggattacaggcacctgtcaccacgtccagctaatttttgtacttttagtagagacgtggtttctccatgtttgccaggcaggtctcaaactccttatctcaggtgatccaccctcctcagcctcccaaagggctgggattacaggcttgagccaccatgcccagccttcaattacttttaactaaaccatgcctatttttcttttcaaaactgcttcatgacgacttactttcgtgtagcacagggctaggcacagagtagatgttcaatgctgattaaactttctacgatttatgcgcaacactgttttcatacaataatggactgaggatcaaaaaggactaccttggggccagggttcaagctttccttgaccttggcttaccactagccagatgtgtgactctactcaatcttcatggtcctcaaatttattttaccttgacaatgaaagattcaagtcataaaagtccctaaattttctctaccaagggccacagggattctatgtgtactgaatgactaccctaacagtgagcaatcggcagtagcccagccttctcattcttccctggcttgggctcacagtccttggacacaacctaagtagatatagcatcaaatcctccagtaggtgccaatcagaattagtctttgttggctgggaacggtgactcattcctgtaatcccagcacattgggaggccaaggcaggaggatcacttgaggtcaggagtttgagaccagcctgaccaacatggtgaaaccctgtctctactaaaaattagctgggcacggtggtaagcacttgtaattccagctactcgggaggctgaggcaggagaatcgcttggacctgggaggcagaggttgcagtgagccaggatcatgccactgcactccaacctgggcaacacagcgagactctgtctcaaaaaaaaaaaaattagtctttgtgccctaaccaaacatacagccagtggtcaataaatatctgatgtcttacttaaatgggtagaaaaaatatttgataagttttcccaaagtgaaaggttgagggtggcaacaaagagatgaaaaagaacaagaagtacgatgttgtagagaatactgaatgcacctctaagcaaaggattggaagtatttagagagaagacatcaaacaactgacagaaagcaacaatcaaagacatatgtaaagaaaacttctctgaaatacccaaaggcctgagtttgcagactctgaagagcacagtgggttccaggcaaaatcaatgatgagacttcagcttaagtacatactggcaatatttttgaaatataaaactaaagaaaaattcccataagccttcagaaaaaataacagatatctatcaaaacaaaataaaaagactaaaaactctggttccagactttatcattacagtttcaaacactgggatgtgatgaggaagaggatgatgagaataatcacaaataacaccatggggcagctcccatgtactgcacactttcagacacctctgactgcccttagtgttctacagtattgattcatttagtcttcacagcaactttatgggtgggtagatacccatccaaagtcaaacagttagtcattcaaaatccaggactgaggccaaggcaacatgcccggggtctgcactcctaaccattatgataaagacaatggtacattatgataaagacaatggtatacacaaaaggtcttaagggggatgtttccagtcccaagagttttataggaggttagttgtggtgcattttcaaagccagcagaaaaaatgctctcagtttctgaagaacgcagagaagaaaatgctatgtgcatgccttcccttagagaaaaactgcttgaagatttaccctagtccgccttgtgatgaatcaaaatcatgacctctagcataggggaattgtgatataagaatgatcagtcctatgagatggttagctaccacaagaccctcctttctcagatgtgagtctagaagaggagcatgatcttgtgccagactgaagtgaacacatagcccaatctgtaagaaggggcagaatggcatgcctttcatccacacagcatttagggaatgcttaaaaacaagcaatttcattatgaacggttaactttagcttcggccatcatcctgaaaagggacatcataaattcctatgaaaaagtctctccttcactttgctgaactaaattcaacaaacaaatctcatctacctaagcttaaaacatctagatttaaatacatgaaaacgctgacgtttttcttagggttatgagaatataggtactattttttctttattctgtttcttatttgatttttttacaaatgcctagtaaacctgcatcagttgcttattataaatataagcatttgaaataggtaaggtttttatatatttcaagcttttacatctggatgtgacctctcttgcagttctctgctctcaatcactaggagtgtttagcagtcaatctcccctcctatctgcccaggtagcaggagtcaagaaccacgattacatccattttcccagcaagttcctcaccaatagttcactaacaaggagacatcctggctacctctgggaccccctcaaagacctccactgtgagttttgacacttgactttcagataatcctctaatcattgcaaccacacagtagtttacctgtttcctcatttttctctccatagtgacaacacaaagcagacagtactacacccttattacagatgaggacaccaaggttacctagaaagcagctgtgtcaataccgcctgctctgtggctacaggcattgcacttcccacctacccgcaagcccaggtgttaccactcccaggagcagcccttacccagtgagggatggaagttggtggataaacatccaggtttccttgacccctagtgggacaatggggtggctttattcagtcttttagatggtcctgggtgggactgagcaccagatatcctctagcacttccagctcatagtgcactcttttttttttttttttttttttttttttttttttttttttttttgagacagagtctcactctgtcacccaggctggagtgcagtggcgcgatctcagctcaccgcagcctccgcctcccgggttcaagtgattctcctgcctcagcctcctgagtagctagaactacaggtgctacaggcatgcgccaccatgcccggctaattttttatatttttggtagagacggggtttcaccatgttggccaggatggtctggatctcctgaccttgtgatccatccgcctcagtgtcccaaagtgctgggattacaggcgtgagccaccctgctcagcccatagtgcactctttaaggggctttctttcttctcagtctcacttcgtctcctgtttaccagtgttccctacaacttagataaactattcgcaaatccatgctaaaggatctgttttttggggaaatccagtctaacatattatgaaaacgagggaaagttacttaacctctttgtgtctaaactgcctcacctgtaaactggggatatagtaacatcttcctcatggtaattgccataaagattatataaattattatagttgatactttagaacagttcctacacgtaacaagtaaactgtctttgctactaatatcatcatcctcccaaccagccaccgatgagccattcagctgtcagtgacagccttaactgatattcttattttgtgcccccccaacagagagacagaaagatcccatcaaacgcattccccttcctgtgtcaggatcaagacagtctacagtcatgtcagtgtgtactcctgccaaaactcctaccagcaaataaatttaagagctcagcctcagtctacttaacaacatcatgttgcaaccagtgaagtcattcagaaatgcataattcaataacaacttagcaccagatgaagttttatgatctgcaacactctgtctgccccggctcccccttatcccccaaaacctcaacattttcaagattactctttgctgggccacttcccaaaattaagagcagagtaaacattctagaagagccttcctttccttgcctgctaatcaggagtcctcagaaagcatgaatcaagagtctgtcacctccaaaggaggggctaggagaagctggattctaaagctttggaatcaaaggccatgcttcaggagcaccttgttccagggcagcatgggttcacaaatgggcacccttcactcccctcccccacctcagccaagcagccctgctatgaagaatggggtgaaagaaactcttgccttatccagtttggatcttaagagttccagagacaaccacgtctgtacacccacaggatggtgagagctgttattattactgtcacgcagcaaggacaaataacattctcataatgttcactgcgtgcctggctctatttcgggatttacatacaaattcatttattcctcatatcacaccggaaagtaagtactattctagtatgcatttatagatgaggagactaaaggagtgtgctagtattcagctctggtctttttgcctcaagcccaccctgttacatcagttatgtaattctggagctgggaccccactaacaacatctctaaactaccttgccagctggctttggtccagtcctagtgatgggagacttcagatggagactgggatgctggaagaaggaagaagatgctctctttctgcttcaaggtccttgtagcatcattccagcaacaggggctgctacgctccaggccttcatcttttctggtctttgtagcacccatggcacagtatctttctgaaggaactaatataacctaggccatgccccttacagctgcagtacaatctgtggggtctccctcctcagaggtctcagaatcagccctgctgtgctcctcctacagacttctaggtaccataacccctcctattccattttgttaccccagccccaggtgtggtcaccacttcctgccatttttggctaccttagcgtcccacttttgcactgacagcctttcatcactgtgtaatggattcccttcaataaaaaccctctgtttgaaatacctggtgtgatttagggtttccctcctggactgtgatttatatcaataggtattataattatctttatttttcacatgaggagaccaaggtacaaattgcccaaggtcatgtggctaattagtgagtgtgctgggatactcaggctgtcttgctctagaggccatgattttaactcacacagtgagctgatgccccactgttctcagcaccctggtcagcgacacagtgaggcaggtacatgaaggctgggagatatcatattctgcctaactaacaagtaatgagggctgactctgctatgtttggggatgtggagtcaaagcaaataactgtctctaccctggaggagactaagagactagggaaggatgcagaaaccaatgagctatagaagaaagtgatacaggctgggaagtggcaggcccagagtcctgtggactcacacagttgtgtggtattgatacagacagaagacagggaagcactgggtagaagagggtggttccccagtaagggccccaccctcaagcctgaagacccacagagctaagtcagcacagacatttctgttttcgcacccaaaaagttgccttttggcccaccatacctccaatcctgtccccatataaacccaagaccttagtgggcacacatacaagtggctgaacgttggaaccagcagaccagtgacaatggaacaatgtggcagagaaagacagaagagaaaggatgtctggacgctgaggggggttcagctggaggcagtcagataagaatctgccactgggcggcccaactccaggggaagaccaccttcccactccatcctccccttctggctccccatccatctcactgagagccacctccacggataaaacctcgcactcatcctttgagcccacatgtgatccaattcttctggtacagtgggcaactgaaggagtgagccacacccgtttcacatcctgcaagggagataagggaaatctctcatttcagtatcatacacagaatagtggtcccaaaagatgctcaattcctaatccccaaaacttacatagactccaaaacttgtatagactctgaagctgtgattaagttaaggatcttgagtagggagcatatcctggatatgtagtatcctggataagtgaagaagggaggcaggagagtcggagagagcgattggaagatgctatgttctggctgtgagggtggagaaagggaccactaggcagggaaagctggtgacgtctagaatctacaaaaggcaagggaatggactcttccctagagtcaaaggaacacagccccactgacccattttagacttctgacctccaatgctataagatcataaatttgtgttgtcttagaccactaactttgtgattggttacagcagcaatcaaaaactaatacaaggagagatatccaaattagatggaggatgttagggaaggcttcctagagcaatcaaatcatgatcttggtcttaaaggaaaaggagagtctaacaggcacaagggtggggttattcacaaagacaagactgggtcatgcacggatggtatatcctgctgaaacacaggtgatggggagcaggggtggggggccagcaaaaaggcaatcagagaggtcaaaagtgacctgatcaggaatggtcttcatcctgaggctgtgtaagcagtggtgtcacgtaggcacaagagttttagggacaactcctctgagtgcacggtgaataatgggtctaagggagagaaacagacagggggaccaataaggaagttgtgtcaattacattgaggaaagaaatgatggaggcataactcaagtaatggccacggggctggagaggcagaggcagaggaactaggccgagggttgggttgggagactgaaaggacaggacttggtcatggattgaatgtaaggagcaaggcatatggaccagtacaaagctagtgttcaacatgctgggtgagtctccccttgacctccacaatgcctgcgcagcccacataagtggaagtctacctcaatttccctgtgcagtaccccagtactctatgctagcttctccaaactatgcccaatacacttcatccctttgcattttcatattcactttcacttacaaagggaagtgaggtgtactggaaagtaaaagatcactgggtcagacagaggttgccttgcaatctctattatttaatggtgtgacattaagcaagtgatataactcccttgtggctgagtttcttcccatgtaaaatcagggtcatggtcatacctcactgggtccttgtgaagatcaagtgtaagtgcctgaaaaatgacaggccctacataaacgtgagttattcctttcttcccatggctattagctttggacccctgcactggtctttctccccattccacagccttctcctgtaatgggccattcagcccagcgcctctagcctcctgagatgccccctctgagcatctgagctctcagggcatcttgggctcatgcatcacatgtatcacgttcgataaaatcaatgtcagctttatgcatgtggtagccactaatctcccaccaggacaggcaactcactttcagaaagcactggaggaaaaacacagtagctgccatagcagaacaaatatgacaagatgacaaagtagagagaaagggggtggtagggagtgagggaagaaacatgcaattcagggcaacctgagtccaggaagcttcgtcagttgctacgctaccagccacagaaagaaaggcttacgcagaaggtgtctgtggctttagagatattgttattttgcaaattcttctccttggcctatccctatgtgcaaggggggagatgcataattagtctgtaagctgctgaaatggctagaaatgactagaagtatcgactgctctgaagtgtcaggaaggggtgtccagatggattaagaggcttatccatagagcctactcagtttgtgggaagagtttaagagatgacaccctcccttatgcaaaggaactgaaaaacgagcttcttccaaatcctccctcattcccctagggctgcctctgcccctgccgtatcttgcctgaagagagacttagcacagcctaactcactgctctttgggaaaggacttcgaaacaacacaattctgcaaggtcccatagacctctgtccctgtctccaaaagccatgattctgactaagccagatggacgctgggctccaagaatagaattagtggcttcatgctgttgtctaccacaggtcactgcctctaggtgcttctgtagaggaagagaacatgaggaaacaggaaggaaaaggtaaatatattgtttatgacattgcaggcactgttctaggtatttctaacatcttattcatgtatttctcaagcataggcccagggaactcaatgacatatacagtgatttccaagggcccatagaaagcaagtctttagctagaacatcttggaacaaaatcctgcttgaaggtgttgggtaggtttgaattttaacacacacaaaaggtttcaatgaaatatcacctttacacaaattatttcagagactccaaagagaagaattacttccaaacttactttacaagcccaggatagctttcattccaagacttcacaaagatatcacatgaaacttttaggccaatctccctcgtaaacacgtaaactaaaatcctacatattgtattaccaagccaatcctgtgatatataaaatgaataacaggttataaccacattaagtttatgctgggactacaagattgatttaatattagaaaatcaatcagtataactcatcatattaacaaactgaaagataaaaatcacatagttgtctcaagagatgctgaggaagcacttgatggaaatcaacagccattcatgataaaacttttagaaaactagaaatagaaggaaagtcctataatctgacaaagggtatctaacacattactctaacatcataatcaatggtaaaatactacacacttttccctgatttccccaattctactggtagttttagccaatgcaatgaggcaagaaaaagaaataaaagaaataaatgttggaaatgaagtaataaagctttcattattcatagactacataattgtgtgtgtagaaaattctttaaaaatctcaaattatgataaaaattaacaagttaatttagaaaagttccatagattaaatataaacaattataaaatgaaatttaaaaagtgccatttacccaatcaatggtaatagacatcataataatggtgacctctaggggaaggagtagtcgactgggaagaaacatgatgaaactaggtaccacaataatttacaccttgatttggaagatggtaatatgggtgtacatgtatatgaaagacattgagctatccacataaggttaacgcactttatgtcctttactgcattctgttctacttcaataacaaacaaattgaataattacttacaaaagcaccagcaaagtattaaaatatctggggatgtatatatacctatatgtgcatttgtgtatatacatgtattcttcttcactgaaaactgccagacattactgggatacatttttaaagatccaaataaatggagagatattccatgctcatgaattagaagaatcaatattgtaaagttgtatattctccttatgttgaagtataagctatcctaataaaatatctgtcaggctttctagacaatttgacaaacttattctgaagtttatataaaaatgcaaaaggccaggaatattcaaagcaatatttaaaaaggaaaagaaagttagagagcttaccttttaggaaattaagatttattattaagctacaataattaagaaaatgaggtattaagctacagtaattaagaaattgaaaaacagttcaagaaacaatggaggcaagaaacaaatccacatattgataatcacttgatctgtgatacagctgacacttcactgtggtaggagaagtgtattctcaacaaaacaattaggattatttaggcatccatatgaaaaaataaccttcaacattgtgccctactttatactataaacaaagtcaattccagggtactatagacctatatgtaaaaggtaaacaataagatttatataaaatagaatgtttctgaccctggggtaggcaaactataatccataaggaaattaaagtggaccacaagggtttctcacgctactcctttagaaccacaaccacctccctccccacttccccacctcatcattcatccctgggaaccaccaatctgttttctacttctaaaattttgttatttccaaaaagacaatatataatctcttgggactgtttttgtcacctgccatcataccctggaaattactccaggttttttttcttttattttattttcttttttttttttttttgagccagagtctcgctctgtcgcccaggctggagtgcagcggcgcgatctcagctcactgcaacctccacctcccaggttcacgccattctcctgcctcagcctctcaagtagctgggactacaggcacccgccaccatgcccggctaattttttgtatttttagtagagacggggtttcactgtgttagccaggatggtctcgatctcctgacctcgtgatccacctgccttggcctcctaaagtgctgggattacaggcatgagccactatgcccggcctagtccaagtttttgtgtgcacggatagttcatttatttttgttgctgtgtagtttacatgtgatatacatatgggtctattgttgtgttgaatgttgtttaaccattctcccgttaagggtcatctaggctattttcaggtttttgctattaaaataaaactgccatgaacagttatgtataggtttttgtgtgaacataagttttcatttttctggggtaaattccttggagttcaatctctgggtcatatggaattcagaactatcaaactgctttccacagcggctacatcattttacattactactatcaatgcatgagtggtccagttcctcacctgtactactattgtcactatttctttttagccattctgataagtatgtagtgatgtttcactgtggttttaatttatactaccttaatggctaatagcatggaacatcttttcaagtgtttatctcatctgtacagcctagtgcagcttgatagctggttctggctggggtcactcagaaggctgcaaacaggatgtctactgtggctacagtcctctcagggcctgactaggataggatctgcttccaagctcacagagctcctggctgtcttcagaagacccactgcaaagatcatgcatggccaggcgggggtggctcatgcctgtaatcccagccctttgggaggccgaggcgggagggtgaaatatctcatcatatcttttgcaaattttctaattgttttgtcattgagttttaagaattcttgatatattctagacattagtcctttgtcatatatatggttggcaaatattttctttcactctgtagcttatcttttcatcctccttgcctgagctttcacagagcaaaaattttaactttaataaggttcaatttatcaatttttcagttagaaatcatgcttttgatgtcaggtctgtattaactttttacttttaattatactcaaatgtatcagagctcacaaatccattcagattcctgatgaaatggtgttcagtcaaatatttggttcacaaacacacaactacgcttgattctatttcctaccatagagtttctgaataacagatatgctgaaaaatatgtctggattgttttgaaagttttagtggtatttattttttagaagtttgatattttaaaaattatgttttcggtcaggatgatgaatagttaatttaaaataagaaaattaaagaatatactcaaaactgtggaaaagatggaagaccatacaatttggaacaacctacaaactgggaagcatgtatccaacacagcactgtccttcagagtctcttcattgaacttaacaaggaagaagatgggatcactaccccaagttcaattaatgattcattagtaagcagctgtcaatctggaaaatgtaagatagacttagatacttaatatgtgacttttactactgtaaatcttcaaagggctaaaacttgatatctctcatgcaagaaaatctggcaacatctgcataagaccatcactgctgtggtgatatttaaagaccaattattggcagcctgcagcctccagcctctacaatgaccctcagtgactccctcctcctgtcattcatggccttcagtaaccctatcacttagagagtgggctggacctagtgactcgcttctagcagagtacagcaaaagcgatgtgataatatttctgagattctgttacactaagtctaccattttacttgcctctctccttctctcttccccttccctttccccttttcctctgctcttccctcccttttcttccctctcccctaaaccctctctttttctatctcccaatcatctctctctttctccttcttctcactttcccctgatctcttttttcctctatttctctcctcctgtcccccttcctcctccctcttctctccctttttatctttctgtttcgcttcctccctccctccctccttccctcctcctctctcccgttctcctttctctgtttcctctctctgccatgtcatgagtggtttcataaagaaacacatatttaagccaacaactaacaaggttctaaagccttccaatagccacatgaattatttttttttttttttgagacagagcctcgctctgtcgcccaggctggagtgcagtggcatgatctcggctcactgcaagctcttccccccgggttcacaccattctcctgcctcagcctcccaagtagctgggactacaggcacctgctaccacacccggctaattttttgtattttttgtagagactgggtttcaccatgttagccaggatggtctgcatctcctgacctcatgatccacctgctttggccttccgaagtgctgggattacaggtgtgagccaccccgcccggccatgaatgatctttgaagtgagtcttctgaagacagccaggagctctgcgagcttgggagcagatcctatcctagtcaggccctgagacaactgtagccccagtagacaccctgcttgcagccttctgagtgactccagccagaaccagctatcaagctgcactaaagctcctaaggcattcttgtgagataataaatgtttcttaaggcactttattttgtaacataggtcatagacaactaagacatcaaacatactccatagatagctaataatgtagcttaatattaccagactttttttgtgtcttaaaaaagtcttagcttgaagttaatataataaaaaggtacaagcggatgcaccagagaaaaaaacaaaacaaataaacaaaaaaagaaacagaaaaacttgacacttcctttaacatcagtttcagaatcaccattgaaggtgaagcttagaaagtaggcaaaagcctggagaagatgtggctgaatctgtttcagataaacataaaaggatacgggttactgttattgaaggacactgtcaaaggaggcattttaatgcacttcaagtgtgtccaaacatttggttaacccagtgttttattttacagtggtaaataaacatgcgcaacttctggccattttatacatttcctctgtatattctatgatcctgatatcaaggaagacattaacttgcaaattactcgaaaggaagataaccggtaaggaaatggtcagtaagatatggatggatgtttgcacacatggaactcaatacaaaacagacacggccatggggcagacactgggtcttcacacacacagcaaggattgttaattcaaatgttccagcacgtgaagcatcacttaataataaagctcgtcctaaaatctacttctttatttcatcaatggggtggtaaaaaagtaggaaaaatggaaaaaactcgcctttgtgggcatgtacacaataaaatgagaagtgaatttgaaagcatgctctgcttcaaagatataccttggcctattcaatggggcacattgatggtctcagtgaaattgccatcattcttcattgaggaagaacacatataagcaataacaaagttctcttaaaattcttgcctaaagcctcatctagatcttaatcagtaaagcaatctgcttaaagccacatataacaaagaacacacaggtttaatgtagcaattttcccgaagtattaactttttttaaaaaaagaattgatctctaatcgtatcattcctatagagctcttcacagcttgcaggcatttatggactcttcaaattgccccatgaacttcctctcctacctttgattcccctaaaggaaaggaaatgtaactttgattgtatgttcctagttggaaacccaacaaggtttcccaacagctagtgtgtactcaagattgaccctgaactatcgatgttctgcccagaaggctgatgtgagcacatttaggggttttaaggtcaattcaaaagctaaagtaaccagttcctttacagacaagaagcataaactgggcctctctaagaaatgaggtgtgtcattatgaaaactgcagggcttaatgcttacaggacccctctgaaaggactaaattgtacccacacctaaatggcaaacgcctgggtccctccaagtccatttccaactaaggtccaagtactgcttttactaaaagtcctttgtattaagctatcccactctaaaaaaaatatcttcatgggttgcaccagtggcctcaaacttggctgcacattagaatcatgcagagaagttttggagttcctaatgcttaggtctcaacccttaccaatgaaatcagaatctatgcgggaagttaaaattgtcaaaaattccctagttgtctccaatatgcagccaagttggagaaacattgggaggcatcatttattcattcatccaaagatttcctgaacactcattatatgcttggcctctaggtgattccccaaccgcccgggtctttgggtggtcatgtcttatgcatctctgtgtgtctaactctagcatcagaggcaacaatgaatgcatacatgaatgaatgaatgaatgaatgaatgaacgaacaaataaatggcccttcttatctgcctctccctgacttgggatacaggaaggatttctaatgcttacagatagctctgcatagattaacccaacaaacaactaacaacgatgtagtaataatgcctgaaaaacttggcaatgaagaggagagacgatggagaagaaatctagtctcatgatgttttctttgcaaacaacctaaaaaggagtaaaaagcacagtctcaagggaccagtgcattacctcttactctatactcccacggaatccttaggcattgagacacctcacatatttacactgatcacatctgaacaatgccacctcacatatttacactgatcacatctgaaatatacatggtcacatacaccaaatcacatctcaagtatatgtgatcattttgcacctgctgaaatagtttcttccttcaaggccctgttaatattgcatctgcttgagaaagccttctaggagaccagcagcctccctgacatgttccaaagtgcagtacatgagattaaataaggtgcacactcatggatatttacttataaattattttaatagtcaaaaatgtacattaacttgtaaaagaagacagacttccttctatcatagtaatatgcactctcatttgaaaaatcaaggaaagcatgtgtcatttttaaaaagcaataatatgaaacacataagagaacagatgggaaaaactcatgaaggggacacaggaaagactttagtgtgggaaactcagctagaagcctttgtagtctacatagtcctgttaccctctgcattgtgtcagtatcatgtctgtgtctttttcccctacaagagagtcatcacagggcagggattatggccaatcatgcttgcactcctcactacgccaagtacagtgccttacaaaggaattctgaatcgacaaaatttttctgtgattgtgttaccagtcccatttaggttaaaagcaattgacaaaaaaagtaagcccacaaactaatttgggtcattgctaaaaatataaaattgatattattctcagaagcagccctaaatagatgacgtgtcatgtgccgctttcctacctacccatctttccaggtcttgatccttctccctgacaacagcagtgagaccctgacccctgatttcttctctaccagcttggccactgggcagtgaatccaggaaagcacttaagtcacaagagatttgaaagatttcttgacatagcactcgaccatctctaacctagcgtttggggatttttcagaaaattatctctgacaaaacgaaacacaaacctcatttcgatgtgaccaccagcttgagaagcccacggaagtcaccttgcccttctcgcctgagctctgtgtgatgcagctcctggggtctctccacagcaggcagtcctctcctgtccctcccactgagcctcagcccccatcaagaagcctggaggctggcaggcccccctcacacaagctgtgtggtataaaaggatctgacatggcttaggaaacagacgcagagcgcctcgactacaccgcggatattttctcagtttaaaaaaatgtgttctcacttaagaatgctaatggcccatgcacagaaataaaatccctgacctactttgaagctgaacttattaaacaagccgaccttattactcagaagagactgtaaaacagtagaataaagcccaaatagaattcctcgcatccctcgttaacaggagcagccaagaaaagcacaaaaggatgtcagagccctgggctgggagtcagaaaccagggcctggtccagctttttgatgactttctgtgtggcctgggataagtcaccatccctctctggctctcagaaccctcatctaggggctggacaaggaggtctctgaggccatttccacctactataactggagatcttattttttaggagcgtaatgttaaagtaaaataaaaatcaattatcaagggcatattatcagacacactaagacaggtgagggagtaagatggacattctgcctcctaggagcctatagccaggcagagccagtgggggcggtccacactgattaatggatttatttcccaacagcaatttgaaagccgccacaaggctacatacagcagacataacacaacttgtgtctgcaacaagaattccctctggctctccacctgacaactcagtttagtcgaatgaatctttcggtgtattttaaaccaccgcagagtcatgagtggccatccgtaagttataatcaaatttatcacactgggaaggaagagagtggggatacatttccacgggattttagggcagtaatgtgagtcattcctgctcattctggagaaaatcctggaactgcaaggtaagttatccaaaccagaatcagagaaaggcagggaaggtcactgatgtaacagtaggcattagtaacccacacaacagtagattagtcagtaatgataggtgctaccgtgggatgcttaaatgatgttactgagaaaatgtcatggtgcaatgtaattagagggcccccttttcaaatttcaggctcagagactcttctcttcattgactctttagcatatgctcaacctcacagagctcagaaaagaaagccagcggagagaagaaattccccaaaaagggacaagtggacctggggtttacattgagaattgcaaatcccatagtctctcccaggcatggccagggtgaactcaggacttgaaatggtgtgcacaaattccaaggcagagcaagatgtgggcaatcctatagagactggatgtccgcaattggagaatgtggtgtcccagggaaagatttagaagggtcccaccaagaagacacttggatcacgagctctgctgtcatcgttttcatagtcctcacactaagtagcctgctacagtgctccataccttggaggtatttgagtccccaaaggtactgtggaacagctagatctagagttcttgtttctgcccattttacagatacgagcactgagattcagagagatatacgcaaggccatagaggtatcaagtggcaaaacaggtaagagtgtgtgcagccccgcgtcaccgaggttaacccttaccctaacccgactctaatcccagcccctccctctctgtttacccacttcccacttgtcacacttgcttaacctcaaatttcccacagctgctaatcacagtctgcacccaccaatcacatcctgttccaccctcatgagtatcctcccacctcctgtgggagtgttgctgaactttgaacagagtgttctttgtcctccactattggtgcttgtatcatgatgggcctattctgacagctattctttgagctgtttggggtgtctccatgttgttgggcccagaaggtattctcttcatcttctcaatgtgcaatgctcattaacatctccagggatcaacacggataataaagaggaagcagagagcccaaggttgcaaggaaggcaaaccacaaccttgctgcagaggctttaaaaggctggggtgaaaagtcatttgaatgtttccagtcctgaatgcattctctgtactgcatctgacaaagctcccttgacacactgaacccccatggatccttttccccctagcaaagggagcaaaactcttaacaatctacttcagtgcatctccataaacagtggccgtccagcacccctgggagggctgccctgtgtcctgtaatgaatgcaggcccatggaaagtattgtaaagatccacagccctacagaactttgagaacactgttctatcaccattaacctacagtgggaaacagaggccaagaggtagcaaggtggtgtttatcaagttcccttagaaagtcagtggcagagctagaaccagatcttcttgattcaaaggctctacctaacacagtttatacttccctgagcatccctgaggagaacatctcttagttttgtttttgcctctcaaattcaattcacaattcttctggttaagcaccttcgcaaatttctcttaaagacccctatcccatagccagcccatatggtttgggatttatcctgccagcagcagggtatgatcagagtaggttcagattagcttaagtcaatcagcatatctactttcccactcccatagtttagggatggacacacgacccaattctgcccaactgcaatcataaatagtttattcatccataagggagaatgctgggattagtactgctgcagacttcatctgaccatgtggggccagagaataagaatgtggagaaagggaaagagagacacagagagagagagagagacagagacagacacaccagaattctatggaagtgctgtttgaacctttaattagctcacactggaagccagtaaaacctattcattgactatttccataaaaaaaattcctctgttgagtaacaaaaacaaagatagtagaaaagaaaggaggaaagaaaagaaaaaagagacagaaaaggaaataagagaaaagtaaagaaagagcattgttaccaggagtggggtgaatggaagttgaaccccaacctaaaagtggtcttggctatggtaggcagagctatgtgcagtgggcccagcaacatagagttctcatgatccaactgatgctcctctttctgctccttttactgcaacccaggttttatttattaaacctcagctcttggaagacgaagcttagagaccatctagcctcactccttccatttactacacagaaaagcttatctcaaagagggaaggaacttatccaaggccatacaagaatccaaggaacagtcacttatagaaacatcacgtgtgccttagagagctttgtaaaaccagatgccacctctacttgcccctgcacacgagctctctgcggcttcctactgtgctctaagaaatagaaaagcagctcctgtcatccggggtttggtcctatcagctaaaacttgatgttgttggaagctggcccaactttctcacccaggccattttgttcccctattggacctaaacaatcttacacaacaccaagatcaggtcaggtcattctgtagccacagtgaagtgataaggaacaagatgacttcatatttttttttctaagcaagacaaaaccaaggtcactgtgcaaatcgcaaaataccatgtatctttcttgtccagctcaaatgagtggctgccgcaactctaccaattatagctttaatcttgctctactattatccccttctagattaggtttcctcagatattcaatcatagaattgtccccacttcctaacagctcaatctagaaaaaactccacccccttgatgtctcccaaaatcatccatccaaagcccaaatcccttaacactgtcttgccgagacaccccatggttctctgtggtgtacattctccctcactacaataagtcataaacccaacttgttcaactatgggtgtgttcctaatggtctttagctggaaggcgttgatatccaaaaaaaaaaaaaaagttccacttcctttcctgatacagaattctttccataatcaagctttcctattgagtccacctccatgtcatgcatgccatcttgtgccatggcaaactaaataccattctgggcctttctaccttccacattcagatcctgttaactggaaaacccctcttctctgatcctctgacagaactaatttgggaagccttctctgaccccaggtagacaaaacaaaccctcatgcctctctgctacttccctatgctgcacacacactgttatgcacccatcacaccgaactgtaattatgcataaccccagactgcaaagctctctgaaggaaagggtcatgtaggggctgatacagaatagaggctccaggtattggctgtttactttcttcctacactgaaatgaatacctttcctattcgattgttgtcatacttcaaatcatattccaaataagcatcaaaaataataacatgcggccgggcgtggtggctcatacctgtaatcccagcactttgggagattgaggcaggcagatcacctgaggtcggaagttcgagaccagcctgaccaacatggagaaaccccatctctactaaaaatacaaaatcagctgggcatggtggtgcatgcctgtaatcccagctactcaggaggctgaggcaggagaatcactttaacccgggaggcagaggttgccctgagccaagattgcactactgcaccccagcatgggcaaaaagagtgaaattgtatctcgaaataataataataataattgttacacacgtccatataaaaggctacttgagcaggcttagagtgagcaacaaggctgtttattcacttgggtgcaagtgggctgagtccgagaaaggagtcagcgaagggtggtgggattatcgttggttcttataggtttgggataggtggtggagttaggagcaatttttgcaggcagcattcacaagggcggggtggggggaggtgcgggggtgtattgtcactagggtggggaggaatgttacaaagtacattcacaaggaaagggaatatcacaaagtacattatcacaaggacagggaatgtcacgatggcttgaccatggtgtggctagctcagaggaccttacaataataataatgataatgtgcaaatcaagactcctgtgaaagtgcagctttggtctgttgtaatcatgtcacttgtcacctgcacaatgctctcagacttgcaaagcacttcctcattaccttgtctcatttaatgcagtcctcatggcaaccttggcttctattgtggcttctcatttctgttatgtctactcttccaagatgcttagacacatgggggactcaaggctgggatgaaatcagggaataactgtagttgtctgtcacataataataagcatttagtacatgttagctattgatatgattatgttatgaacattactcttactattatggactaggatggtcctaggcctgttcaccattagatagattccttgcccttgatctgttctgctctgtataatggggagaggttggagtggagattagggggtggggaacaggtttcccaagctcctcagctggcttctgatttgatcagctagatgcactcttaggagattaggaggagggagactccaggtcatgtatgtctgtctgtctgtgtctgtctgtctctctttgtctctctttatctctctctctctctctgtttgtgtgtgtgtgtgtgtgtgtgtgtgtgtgtgtgtgtgtatgtgtgtgtgtgtctatctgtctctctccccactaaccctctcttctttaggcagatgttcttgtagcatctcaggccaatgctggacttcccaccatagcttctgtttgttgttaatctctgaattggctcatctttgcaaccaattccctacattaaattccttctgtttgaaacatctggagtttgtatttttttttgctgggccttgattagtggatgtactaggtacgtacatttgagcaagttacttgctgcattaaagtatttttatcctgtgaaaagttgctaatatctcaacattttgtattgagcatagaaagtaaaacatatgggcacataggcatctcagcacctggcacatagcagtcattttaaaaatttagtttcttctttcttcattagaaagaattgttatgtgcaaagatctcattctagggactccctagataaagaaataactgaaactattacagaatcaacaatgattattacaaaattatgtgccatacagaatcttgaaatacctaaaaatacaattacagcatattgtcatataattgtgtccacccaaaagaatatgttgaagtcctaaccctcagtacctcagaatgttaccttatttggaaatagggttgttgcagatgtaatctgttcaagatgaaacactatactggaatagggttggccttaatccaatttggctggtgtctttataggagaagatgcacagacagggaaacagggagaatgcagtgtgaagacagaggactggagtaatgaatctacaagacgaggatgccaaagattgccaggcaacctccaaaagccaggaagaggcaaggaagaattacccttcagattccaaaaggagtctggccctgctaacaccttgctgtcagactcttagcctccagaactgtgagtgaataaatttctgtgtgttgtttttttgtttgttgttttttttgccacacacagtttgtggtgctttgttgtagcagccctaggaaattaatagaatggtaagaaaagataatgagttggtagaattctgttggctcttaacattttcatcctgttatacgggccctgtataatccttgggagcatgcatatgccgagatagcattcccatgagtaggttatgttacatggcacccttgactctaagaaagggagattattctgagtagatctgacatagtaaggtgaactcttaaaaaagatggaaattccttctggcgaaagagatgtgtggtgtcagaacatttttatttgagagacaggctccatttttggctttgaagatgaaggaagcacatgacaaagaatgtgtgtggcctctaggagctgagagtggccaccggctaatagccagcaaagaaatggggccttcagtcccaccatcacaaggatcagaattcaaccagcaacaaggatgagcctagagctaggcatggtgatgtatgcctttagtctcagctactgggggaggctgaggcaagaggatcagctgagctcaggagtttcagaccagcctgagcaacacagcaataccccatctcgaaaatcaaaacacaatgagcttgaagcagatttttatccagtgtctccagatgaaaattcagctcagctaacaccttgactccagctttgtgttatattgaagagattccaaccatgctatgcccaggtttctaacctacagaactctgagatcataaattattttaagctgccaagtttgtggtaatttcttatgcaaaaatagaaaaccaatacaggtaggtacattcactccttaaaattgtatgcaattattaaattataaaaatgctaaaggtcataaagaaatatgcaaaatatgtgtaatatagcattaactttaaaataactgaaataaaatggtactctcttctgatggtatctatgccaaatacatatttatgtggataaaacaaaaaatcaaagagactttggatgtactagggtgacaggattattagttcaaagttgtcattagtcttcttttatcattttaagaatataaaatattataaaattcaagatttttcttgcccccagcccacattgaacagacaggatagactctaataggaagcatggtgtcctatgagccaagctacttgaaaaagagaaccacatgagaactgacatcctataaaattccactggagagagagatttctcagttagattaatatatcaccacatcacaatgactcatttctctagaaattccacacaggccctccttgtggccattctcctccctgcccaagagaaagaaacatagacaccgtatacttggggctaaaattgcagcttgtgttaagggcccaagatagcaggcatgctctacacgttccactttgcatttcccgtaggtctctgtcttggtctttctctttccatagctacctcctaagtggcttgaacaagttgcttaacattctgtggcctcagtgccctatcataataaagacattatgaatgtattacttaataaattgtacttccctctttttccatatatttgctgtgtgatcttagggaatacagtctctagcagtttcagttttacaacacctgaaatgggtgatgactacccatgcctacctccataggaatgttgctagcattggcattaacgagcagaattacactgttaaaggtcaagccagagagaggacaccaaatcccatccatagcagagagaatgggcagcaagtgctgcaaatggaggctgccaggtggaggtgtacagagaggtttctgcctcagagaactgaaaatccaaatactacatggtgtaatgtaaactcagaggcatgccaagcttgtagcttgctttggttattaaaatgtgagtacaaaggacctaaggtccttcgggacagaaagggccagtgctcagttccccacatcctcttttcctctttgtcatagtcaccagcaaagttacagatggcggctgctctatcatcttgcagtgtgttacggatgtttgtcccctccacagaatctcatgttgaaatgtaatctccagtgttggaggtgggacctggtggaaggtgtttcggtcataggggtggatccatcacgaatggcttgatggcctccttgcagtaataagttcacatagatctggttatttaaaagagcctaggacttttcttctctctcccttgctccctttcttgccatgtgacaagcaggctcccttttgccttccaccattattggaagcttcctggggcccttgctagaaatagatgctaccagtatgctttgtgtacagcctgtagaaccattagccaaatagaccttttttctttataaattacccaacctcagatattcctttatagcaatgtaaaatggactaacacagaaaattggtaccaggaatggagtgttgctataaaagtacctgaagatgttgaactggtttttgaactggtaatgggcagaggctggaagagtttggagatttcagaaaaagagagggagatgagggaaagtttggaacgtcttagagacttgttaagtggttgtgaccaaaatgctgatagaaatacggacagtgaaggccaggctgatgaggtcttagatggaaatgaaggatttattagggactagaataaaggtcactcatgttacaccctagcaaaaaacttggctgcattatgctcatgccctaagaatctgtggaaggttgaacttaagagtgatgacttagggtaactggcagaataaatttctaagcagcaaagtgttcaagatatggcctggctgcttctaatagcctatgatcagatgtgggaacaaaggagtgaccaagttcagaacttataattaaaagaaaagcagaaagtataacattggaaaatctgcagcctggccatatgggagagaaagaaagaactttttcagaagaggaattcaagtgggctatagagaaaccatttgctagagagattagcatgactaaaagggagacaagggctaatagccaagacaatgggggaaaggccttaaatccatttcagagatcctcagtacagcccctcccatcacaggcccagaggcataggaggaaagaatggttttaggggccaggcatgggacccttctgccctgcccagcctcaggacactgctccctatatcctggctgctccagctcccactgtggctcaaagggccccagatacagctcaggttgccagcccagagggcacaatccataagccttggaagcttccacatggtgttatgtttgcaagtgcacagaatgcaggctttctgatacatcctctgaaatctaggtggaagctggtaagcatccttcactcttgcactctggcctgccacaagggcagagccctgcaaagagactctactagagcagtgccatggagaaatgtggggctggagcccccacaaagattccccaccagggtactgcacagtggaattgtgggaatgagggccactgccctccagatcccagaatggtagagccaccagcagcttgtactctgagcctgaaaaaacagaaggtactcaactccaacccatgagagcagccacatgggctgtgtccaagaaagccacagggacaggaatgcccaaggccttgggagcccaccccttgcaccaatgtgccttagatatgggacatagagtcaaaggaggttgttttagagctttaagatttaatgcctgccctgctgggttccagacttgcatggggcctgttgcccttttcttcgggccaatttctcccttctggaatggcagtgtttacctaatcctgtactactattgcatctttgaaataaataacttgtttttggtattgtaggctcatggatggaaggaacttgttttgagtctcagataagactatgaacttttgacttctgagtggatgctctaataagttaagactttggggaactactgggaagaaatgaatgtgttttgcatgtgagaaggacatgatatttggggtccaggggtggaatgatatagtttgaatgtttgccccctctacaaatctcttgttgaaaagtaatccccagtgtgggaggtgggacctggtgggaggtgtttgggtcatggggggcagatccctcatgaatgtcttaaggctctccctgtggtaatccattcacatgagatctggttgtttaaaagagcccagcacctccacctctctcttgctccatctcttgccatgtgacataatggtttccctttgccttccaccatgattggaagcctcctgaggccctcaccagaagcaaatgctggcactatgcttcatatacagcttacacaaccatgcagagccaaataaacctcttttctttataaatttttcattctcaggtatttctttatagtgattcaaaatgaactagcacatcttggatcccatgtatagagtagagccctatccaaatgccaaggaatatgaacaaattgaacttttttttttctagcctcggacttatggggctgtttgttactgcagcattacctcctgcatcctatctagtatagctttaagctactctccccctctaacaagtggagaaaatgaggctgacagatgaaatcattggctcaaaagcacatggctaccactgatagaaccaagactcaagttcaggtggcctgactccacagcccatgactctcattcactgtggaaacttccctctgccccttgatgcctggataacccaacattgtgttcaagtggaagcagggatgtcacaagaatcccactttaaaatgagcagtatactgtgccattcattacctggactaatgagacaaaggtgatgcaggagatgccaagcatgagggcattctgacagcaagaggtatctcattaggaaaataatcctgaatgacattgttcttctctcaacaggctcccgaagaggtccaggtgccaagatagtccctttccccaagtcccacaggatctaattgtgggttctgccctgcctggatgtcagcttagattttctcaggccacaactggcttggcagtgggtatgttagccctgattttaagagaagcaaacattatgtagcagcccaaaaaagaagcccctactgagaactttgggtactaagagacaggttctatgtactcctcccagttgatgatactcagtgagatgacatgtttgccagggacagtacacatctgtgcaccctgaggttatgcaagatcactcaggctaaacagttaggatacccagattcacgaccacctcaaaaacagactatcagcgtgaccttggttctatctctgagccctggactccctattcatagcacaagagaaatggaaaagtgatatgtaaggtgatttccagcttaaaatataataataaaaactgatgtcaactctcacacatagctgataggcctataaattggtacatcccctatggagaataatttggccatatctatcaaagttaaaaatgtttagcaatctcagacctaggaattatgctaaagatatgcttgcacagtgaaataatgtttgctcaaagtaattcattgcaatattgtttgtaacaggaaaaaactgaaagcaatccaaatgcccacctatagaacccaagtaaataaatgatggtgcgtgcatacaatggaatatcccagagctatgagaaaggaggaagctctttatgtctgaatgcagaaatacatccaagatacattaagtggaaaaaaataaagccaaaagagtttttgaaatacgctacaatttatgtaagaaaaagaagataatatgatggggatttaattttgattaatctacacatgaaatacctttggaaagatatacatacacatacacacgtacacgcacacatacacacacacacacacacacacacacagagtaacattggtaatctccagggaagagaaatgtgtggctaggataaggaataaaaagagtaattttcagtgtacctttttctttcttttgattttttgaaccacataaatatattaccacaaaaaaatgagtaacattgcaatatttttaactgctgccagccaggggttgaataagaatcaagaaaattcccaaaagcacattctgaagatgctgacgaatctcaagtatcttcctcctggagcccactacccaaaggtttctcatgggcaaaatttttctcttctctattcccagtatacattgtattatctgccttcctatcatccattgctcttcagaaatttcaccatataccttaaatgaaactgtaagacttttaacattttcttttcaattttgaaaaaaatgaacttagggataagtgaaggaagacatgtgatacagtttggatgtgtgtccctgccagactgcactaaaatgtaaccccgattgttggaggtgggatgtagtgggaggtgactggatcatgggagcggatttctcacaaatagtttagcaccatccctcttggtactgtccttactatagtgagtgagttctcttaaaagctggtcatttaaaagtgcatagcacctccccctctctcttcctccagttcgggccatgtgacatgcctgcttcccctttgccttctgccatgactataagtttcctgagacctccccagaagcctagcaggtgatagcattacgtttcctgtataacctgcagaaccatgagccaattaaatctctttctttataaattatccagtctcaggtatttctttatagcaacgcaagaatggactaagacaacacggaaagaagtaagcagaaccaagctctaggtagggctctcatttcccatgcagctgttgggtgagcaccttgccctctcagagcctcagtttccccactggttcaaaaagagctatgggatagctgaggtctcaggtctacttccttccagctttatgtttctggggttctaagaatcatgtggaatagagaaaaggcaagaccacattttggaggaaactttggaccagctgcctgatgagcattttctcactttactgtcatctggcaacatcctaaatgaaccaatgagtgtccagatgggggccaaactatgagtcaaatcaacacacactcacttattatttatgtacaaattctgtgacaggtgcagtattagaagccagaaatacaactataaacaggatacaattctgcctggacagagatcatagtataaagtacactatgtagcagacaaaaaggtgatttcagtctccagcatctcatgacaaacacgtccacatctggccacaactgactaactggcacttaacttggtatcctgccaaaacaatcaaaacactacaaaaatatatgagtgattttttccagcacagtattttgatcattgatagcgaagaaatacagaagtgagactcatgtttgtcttggctttctgcctggtggttattttctagacccgacacagagaggtggaggccaaacagcatcgcagtcttgttgaactgaggaacccgaattagagttctgggctgctgactcatctggaatttgtgaggaagggtaccagagagttcatatggggagtacctgttagaatttggatattggctggcctgcatatttgcaaggtaaaactctgtaaggtctagaaaagagtggttgatgcagggctgagagctgaacagaaatgtgagaggttgaccagtgctgggaacctctggaatcctggcccacctgcagtggagttgcagttgaggcttcagaaagagcaggttatagtagtgaatattacatcaaaatcaaagtaaggcacacacatgaagataactgataagccaaaatagatccctcctaacaaagtataagacaataatgacagtttcagaaggacacgccggtaatttaactgcttaccaggataaaattcaataccatttaagtccaatcaatataatccagaccacctacagcaaactatctaccattcttaggtaacaaacaggacataaataagtaattagataggcaaacaaataaggagtaaaatgaacagatcccaagataattcagatgttagaatttgcagatgagaactttaaaatagatactataaatatttttgaaagatttaaagaaaattggatataatgggaggatagctaggaaatcacagcagagacatcagaagtaagaaaataaaaataaaaatctgatgactaaaaactaccatatctaaaataaaaagcttactctggggttagtagcagtgcaggcactgcagaagaaagagtccttgaatataaaagcagatcaacagaactaatccagtctgaacaatggatacatatacacaaatattaaaaaataaagagactttgcaacccgtgacagtgcagaaaaatatctttaacacatttctgagaattttaaaaaaacataaggaaccaagagagataccatattcatggattggaaggttccaattaagtggtagattctcccaaaattgctctacagacttagcgtaaattttgatcaaaatcccaaaagtattttttctttttaaataaatcaacatattggtgctaaagcttgtatggaagtataaagaaccaaaaatagttaaaacaatcttgattaaaagagtccatgtgcaaatccagagatatatgggaactttatactttttactcacatttgctgtgaacctaacactgctctaaaaaataaaatacattgtttaaaaagtacttgtgcagtgggacttgctctattgcacttctgttgtaagaatcttccactcttggtggctgctcccacggttctgggtctcagaatgaaaaaagagcatagatctgagctggccagacccacagcttgaatagagatgctctgctaaatagctcggatcagctgactcctaactaaaccacagacatgtgagcaaaaaaataattgctatttaaaaaaaaattgcagagggtatatacccagtaatgggatggctgggtcaaatggtatttctagttctagatctctgaggaattgccatactgtcttccacatggttgaactagtttacagtcccaccaacagtataaaagtgttcctatttctccacatcctctccagcacctgttgtttcctgactttttaatgatcgccattccaactggtgtgagatggtatctcattgtggctttgattttcatttctctgatgaccagtgatgatgagcattttttcatgtgtcttttggttgcataaatgtcttcttttgagaagtgcctgttcatatccttcacccactttttgatggggttgtttgtttttttcttgtaaatttgtttgagttcgttgtagattctggatattagccctttgtcagatgagtacattgcaaaaattttctcccattcccaaaggattataaatcatgctgctataaagacacacgcacatgtatgtttattgtggcactactcacaatagcaaagacttggaaccaacccaaatgtccaacaatgatggactggattaagaaaatgtagcacatatacaccatggaatactatgcagccataaaaaatgatgagttcatgtcctttgtagggacatggatgaagcaggaaaccatcattctcagcaaactatcataaggacaaaaaaccaaacaccgcatgttctcactcataggtgggaattgaacaataagaacacatggacacaggaaggggaacatcacacaccagggcctgttgtggggtggggggaggcgggagggatagcattaggagatatacctaatgttaaatgatgagttaatgggtacagcacaccaacatggcacatgtatacatatgtaactaacctgcacgttgtgcacatgtaccctaaaacttaaagtataataataataataataataataataataataaaagcagaggtgtaggtcttacatggatttcaagacttgtcataaagctataacaattaagacaacaagacatcaaaataatgataaaaaatagatctacagaaaaaaaagaacaacagcagaagatccaaaataaacccttacatatgcagacacctgatatattataaaggttcaactgaaatcagctggggaaagatgatatttttaacaagagtcctgggtcaactgatatccatacagacagaatcaaagtgacagtttttatagtatctatataacactttatgtgaaaatcaattttagatggattacatagacctatatttgaaatgtagagtaatagaaattctaaagataatgtgagacaggattttttttttattgtggggaacacaagtatttcttaaatatggcaaaaataaataaaagactgataatgggacatctttaaaatcaaaactgttattcatcaacagatgccattaattaagtgaaaaggcaagctacagaaagaaaaaggatatttatgatatgtatacaaggactcagatctagtaaatataaagaactacaaatcaataagacacaactcaatataaaaaaacaaaagacctgaatatccaattcaaacacatgacatcaagatcacctgtgtgtgtgtgtgtgtgtgcatgcgcgtgcacacgcgcatatgtaaaggttgctcaatttcactagtcatcagaaaaataccacaatgagctatcaccacatacctaccagaatggctaatattaaaacacagacaacaccaatatgcaatctgtcatattagaaagctatttggcagtatctgcttaagccaaagaacaactctactcctagttacatatccaagagaaatggagtccaatactaccaaaaacacgtacagaatatttacagtcacgtggttcattatgtctaaataatagaaacaactcagatgtctgtaagcagtagaatggatacattttggtatattcattccatgacatactatttaagagtaacaacgtgggccaggcacggtggctcacgcctgtaatcccagcactttgggaggccgaggcgggtggatcacgaggtcaggggatcaagaccatactggctaacacggtgaaaccccatctccactaaaaatacaaaaaatcagccgggcttggtggcgggcgccagtagttccagctactcgggaggctgaggcaggggaatggcgtgaacccagggggcggagcttgcagtgggccgagattgcgccactgcactccagcctgggagacagagcaagactctgccttaaaaaaaataaattaaaaataaattaaaaagtgaatacaacatggatgagactcaaatataatttcaagtggaagaaactagccaaaaaatatataatttatgctcttatttatataaaattcaaaaacagggaaaataattctagtagtcacaatacctttgcaaaggagaatcaatgacttggagtgagaccgaggagggcttctgaggtgctggttatattctgtatctcgatcaggatgttgtttacattattatattcagttataatgtgtcttttcctgcatttttattattcttcaaaataaaggtttatccacacacacaccaaaaaataaggaactgcaagagtccagttgagagctgacgagagccaatgcagtgatactagtgatggtaggaaagatacatagtcaagaaatattcaggagctaagttggtgggtctgttttaattgaacatatgcagggatggagtagggcgaggactgaggaaaaggcaggaatctgaaatgaatcttaggtttctttttagcttcgctgaagaaatgaatggttgagccaatgatggagatgaaaacttcgagaagaacatgttgagttgaagtgcctgtggcaatccacaggaataactccaacagctagttaatcgtaagttcagcagaactgtccgcgcaagagatatgggtgtgggagtcatcagcctccctggtcataattaaaataatgagattggatagactcactcacaaagagaaatatgaaggggtatggtagccagcactctggggaacattatatttaagggaaaggcccagaaacagaaagctgtgaccaagacagaaaaggttcagctgtagaaattgttaagaaaccaagagatatagttatggaagcccagtcctgagggaaagtcctgaaaaactgtggccaataaagtgacttctctccaacagcttggcaggaaggcaagaagttagctctatagccgtggtccttgggcaagttatttctcccctctgagcctcatttttttcagctccaatgtgggaatgttacagctaaagagtattgttaaaggctattgtgagaagtaaataagacaatgcatatgaagtgtttagcaaatagtgaaaggtctatggtcatggtgacctatagaaactatgagcaaatcaagcagggtgttctttctcaggatgagagagatagggatatgtttagagaccaaacagaagagccagtgtataaacgtcactggatacccagagaagaagcagaaagggcagccccacgtccccaggtagatggaaacacctgccactctgacacagggtaagaacggatgtggagaaagacacatctgacaaagaagtggtagatgaagcaacgaaaggggtcattcctaccaaaggcctccgccatgaactcacatgcatttgggcaagacccctaggtgtgggacaatcggtgcagatactagagatattgtaagaaataacaagtttcatttaactcacttactcatcatttagccactcacctttgacacatactaaatgcctactgggtgatttacagggaaaaaagaaatccttcatacccttgaggagataacagttccactgggatgctgaacaaggaagaaaagtgcagtgaatatatattgaacattgcctttgtaccgaaccgtgggcttacatgcatgataaatgatatcatgtgtatcccttagcagaatgggaggtaaaaatcactattcccattttacatatgtgaatactgaggcatgaaaatttaactgattagcccaaggtcacatggttgtgtctgactggtagtgcaataagagaatgcatataagcaagtgattgcaaggaagtaaggtgagatgtgtgttgcagaggtgggaattatggaggggtcaatgaagaaactgacgtataagttagattccgaaataagagttaaagaaaaagggtcaaaggcaagaaaaaactgacgaatgttccattgtcaccagaatatatgtgtccacagctcactccttgtatagagagaagttgtctataagtcgtgcttgcctccccattatcaaaatgtggctccttcttgaataagtacaattcattatcatgactgaagttatactggattttctccaagctttcctgagtatgcagaattgtccttctgcactgtcaaatccccagatcacatacttagcagctgttttcaagatattttgtcagaattgcttgtcatagaggcatagaataatgtgtcgcaggcatttttgaatataactgtctctcactagagagttggggtccagtaaccttgatgagcttaggaagctcgagagacctcctggcatgcagccctgtgcttaccctgtctgcctgcacactgtcccagatgctctgagctcacagcctgtcaatgtgaaaagacaaacacacaactgacaaagtgtaacaagtgtcaaacaagaggaatgtgggacagaacgaagtgttagctctacacagacagcactcctccaaggaggtcagaccacggttcaagcagcatgaacaaaaagcagggagtttgcatgttcaagggtaacttcatgaacaaaagttacttgggcctgaaagaaggcaaacccagggacaggatgcctggaaatgaggagatgaagggtacttgaagtcagactcaaaagttaaaatgtatcttaaaggcagcagggagcccctgaaagacaaggaacaaggggatgtcaagggaagtgcatgatggtgaactggagatgagatggatccacaggaggcagggttgtggaggcctcatgtgatgggaggatgtgggtgtcactcaggtcttggcggtgtgggtggatggaagcgtggtgggtgggcagcgaatatgtgtaatgctgttgtaatcaggcgaccaatcagacaagggctggggagggagcagtcgggctggccctcaggcttctggttggacaagtggatacacagccatgctgagaaacggacacaaacaaagaagcaggttaggggaagagggtcagtcagtgcagtttggggtgtgaatggactgtgggacctgcaggctctgcagcatcctggggctgacatcagagcagcaagtttcccttgtcattcctatcatgagccagtttcatagtcaggtttctggccttttccaaggaaatccctgctgccatgtgcatccatgcacgcacacacaggtgcatccctcacctccatctcctaattgcacagacacctccctccacttatcaacaggccaacccatttcagaccatcagtaaaatgccatttagtgataacctcccagtgatgtctgatcctttggtggctgctgccacatcccccagggactcatgaaattgtgtctgtcttgatactctgctggggccactttgtggaaggatgccaatgcccccatgttgccagaggtatctgcacctgttccctttcccttccttgcagcatctagcactgtgctcagctgcattgggaaatcctgcttgctggcctctttgcttcctcccaagtgtcctcccttcctctctgcacattcttctcaccatatcgggtctatgagtcacctgatgaacttgttaaaacacagattctgattcagtcggtggggtggggggtgtccagaattctgcatttcaaactccaaggtgatgccaatcctgctggtctccagcaagatttacccatgcccactgtctccactgcctcacacccacctccaatgcccacctccttaccagaacatctctggcttaattcactaatggcctctatgtgactaaatcccctggacattagcaactgaccctcctgctcctggaaatagtctcttctctgatctgacattggatggaagctccatgagacatctgcttctactgtaaatgggctggctagaaacttcccaaaagaaatgcctgtcgattccactttctgcaccctcgctgggagctgactccccgtctctgtcctttctgagagtctcagagtgctctgggtcactctgtctgctctctgtccaaaagtaggagaatgtcttcatctacagcagcagcatccagcagaaccctccacaatgccagagatattctatatccacactatcccacatggttgccactaggcacatgcagctcacgtggccaagaaactgaaatttttatttttacttaagcttaattaacttaaaaggccacgcatggccaacagctgacatacaggacagcacagatctatgtgcacaacaccccagaaatgagctcatcgcataccacatgttcctcaggactatggcaaactttaacaagtctgcagttatcctggaaggtggtaaacattagtggatggaaagcatgcctgccagactcagatgacttgagtacaaatcctgcttctgatactgaatgagtgactttaacaagtcacaacttcagttgtcttcattggtaataatatgaatataacctcagaatgtcttcctaggggtaagagtagtacttatctcattgactttctgggagtgttaaataagtaaatgtatatagagtgcttaggtcaatgcctaacatataaatgctcaatcagtgctgtcttgtcacgattttgattaagtctccaacctggttttgcaaagaagggattattgtcttaccatcttcattttgccaatattaaagaaaaaggggccacaccaagaacacacagaaaacgagggcttgaatatggtcctgcccagctcggaagcagctggcaggtcaaccaggggccggatgtcccattcgaagctgcagtgactgcctcccagggcggccttcccggtgagctgggctgtggggcagctcccacagagctcactatctccatatccccagaagtggctggtgggccagatgtagcaatgcgggcacctgccatgttcagtgcagttgtggcctgtggtctatcctcaggggcctgaaaaggacttgtagctccccttcccagatcctcagggcctgcataatacccctcttccactctaccctacagggacaggacacacctccctttctacccaatgtagccaactgtgtgtttctaaattcagaggagatcccagcaagatgccacgtgcttttgagatatcctcattgtcattccttgcagaaggtaccctaccccaggaagcagtcatggggagctagccacccaaggagcccacatgggatgggcagatcagaaggctgtgatttgaaagccaaaggcagaatccttgctctcctatctggacagggtaggcaactggactggagtgggattatcactgggcttggatccagaagactgggactcaaatccttgctttgatacttcctgtttgatcttagtgagttcatattacctctccgaggctgtctcaatgagtgaaaataagcttgtatgtagcaatgcatgacttttaaagtattttcacaagtgtgaattgaatcatttgttcattcagcaaatattcattgaacacccactgtgtgttctgtccctggagagacaatggtaggcaaagcaataaaatccttgccttcagaaagctcactttttaatctaatcagctaagtgtaatattaaccactgagatcaatcttatgaagaaatattacataacaatgaaaatgcatcaacaccagctgtgtggttgtttcaattattctgtttgctcccctaattcagtctctgtcctccctcatgcacctggaggcccaaatctattcactgcatctctcagccctcttaccctctggtggtcagtggggctcagccagtgagaggctacagcaggaggtagaaggtaaatttaaaacaaaaacaaagctcagggcatttctttcttgtttccctccaccatcccctaccccaaagttcttagttttcatacttagtttctaccactccctcccctgccccttgagacctgggaagtaacagctccctgctattgtttgtccctggctgcctcctcattcctcatttgtttcctcaattctgctcatatccctgtaaataatctcttcatgcctagacatggtaactcatgcttgtaatcccaacactttgggaggccaagacaggaggatcacttgaggccaggagctcaaggctgcagtgagctatcatcctgccattacgctccagcctagcatagcatcttccaatctcttcttctttctctctctctccattgccacctctcctcctttgactctgaccatccctgcctccctcttttataccccttgtgattacagtgggcccagataaatcagtataatttgcccacctcaaaatccttaactccatcataccagcaaaatcccttctgctatgtgagagaatacattcatagattcttgacagcaggatgtggacatcttttgtgtgtgtgtgtgtgtgtgtgtgtgtgtgtgtttgagactgagttttgctcttttcgcccaggctggagttcaatggaatgatctcggctcactgtagcctccacctccctggttcaagcaattctcctgcctcagcctcctgagtagcagggatcacaggcacacaccaccacgcccggctaattttgtatttttagtagagacggggtttcaccatgttggccaggctggtcttgaactcctaggtgacagagtgagactgtctcaaaaaaagaaagaaaaaaaaaccttcctcaataaactctaactagaaacaaacatgctgtaaaggaaagagcaggtgccttgagaatgtttaatgacaggctcatttcatctaggcagggagatttatcatctcaggtgggattggaagaatgtatatgaggtagacaaacacttgtacaatagtattaaaatcctccactttacaaatgagaaaagtgaggttcagagaagggaagggtggccaaggttatgcaaatccagtcttgtttgtgcatgcaaagcagctcactgtgacatttgccttccaagtcctagggacttttattactttcctattgctgcagtagcaaagttccacaaacttggtgatttaaaaagtcaagaaacaacagatgctggcgaggttgcgcagaaatagaaacacttttacactgttggtgggaatgtaaattagttcaaccattgtgggagacagtgttgcaattcctcaaagatttagaaccagaaataccatttgacccagcaatcccattactgggtatatacccaaattaatatacatcattctattacaaagatacatgcacgtgtgtgttcacaaactctgactctgaccatccctccctccctcttttatgccccttttgattacggtgggcccagataaattggtataatttgcccacctcaaaatccttaactccatcataccagcaaaatcccttctgctatgtgagagaatacattcatagattctggacagtagaatgtgggcatctttattattattattattattattattattattattattatagactgagttttgctgtttttgcccaggctggagtgtaatggcatgatcttggctcactgcaacctctgcgtcccaggttcaagcaatcctcgtgcctcagcctcctgagtagctgggatctcaggcacacatcagcacacttggctaattttgtatttttagtagagatggggtttcaccatgttggccagactggtcttaaactcctgacctcaggtgatctgcctgccttggcctcccaaagtgctgggattacaggtgtgagctaccacacccagcctggatgtgggcatctttaaggggtccattattctgctactacaggggcctacggccatggagtggatggtaacttgcccatcataaagactaggtcctattgctgaggtgttacctgcagcaatgttgcctacgggcagccacaaacaaaaccaggattctgaggccagatggcctttggcaaaaggggctggtccagcctactgtcagctttgtgaccctgagtgagacacataacctttgtaagcttcactttaccatttgcaaaatgggaacactatctggtccccatgctgagaagacacgagctggtgtgtcaagaactcaccacacagtagggcctcgggctcttccatctctcttgtcctcctcctgccttccattctctagatgcacacacacgtgcagctcacgttcagtccctcagcagatgctatcactatactttggagactgatgagctgttactaatgggatttttgtgtgtgagcagggagaggcagtgggagaatagaagagcttcagtacctcattcatcctgctgagattttgacacagacacagatcttaagagaattaggcaaagaagcagacatgctatgaataaatgtcagtgcccctcacaaaaggttacctcccaaggcctcactttttgcctgccaatactctgaggtaccagagtatctctgatcacgacgcccatctttttaacatcttttgaagactgccctgctgctgacaggacagagagaggcctccattgtggggaacctcagatggccttgtgcctgtctcctgactgctcttctcatttgggcctccatcccccccgttccaatgcaagcaaaaaaagagggtatgtcccaaatttgatatcctcttagatatctaatcctatgtaagacctgttacttgacatctttcggtgaagcttcttcagttgtaaaatgggtcactgtgaggccaaataagatcacagttggaacacaccaagaacactgccaagatacaatagctagcagagatttcattaacataacacttacagtgtgccaggtgttcgataaggtttggatgccctcctttatcacactgtctaataactgacatctttctcaggagactgtggaccatgggagggtacagaggtgtcacttatgtgtatgtgtgtgtgtccgtgagtgcctagagcattgcaggtatccagtgaatgcttgcaggaaagcaaatggaagaacaagtaagaaaaggacaactggtatgcccaccaatgttcaattcagtagaaagttttcttctggagactccagggactgttattttccctggtctactaggtgttcctgctaccatactgcagcctcaatgactgatcttactaatgacacatttgaccttgttacttttgtgtttaaaaccttttaatggtctccaggtacaagtccaacgttcttagcttggtcaaatcagaccctcctgatctggctctactggattgtatctctcttgctgcatctccaaccacccttcttcttgaattttgtgcatgagcagcaccaaacttggcaccatcctccaaataccactgtatctttcctcacattgtgcctccatccagaggctctcttccttctcaaaacccacaattatctctctagagctggctccagacgaccttccagggcaacttgcagcacccttgaaaagaattattgcccattatgtttgctctcacttcactaacagctgtaaatacctttaccatgcatcagtatttgggcagattctgtgccacacaactgtcataccttatctctaagccagtgcctctcaaatttttcccaggcattctaatgccccgaaggactttaaagacagattcctaaaccccaccctcagattctgcttcaataggtctggggtggggccggagaatttacatttctgataagtttctatcactgctgctgctgctccatgatcacactttgagtagcagtgcctcacttgtgagcaaaattacattatcatcttgcaaggggggagaggtaaggacttgccataggctaaatgatccagtggtgaggctagattttgaaacccagtctctgaagccacagcctggctcctttactcagcaacagcactaagagcatccaacattgactagcagttacctctagttcattccaccaagcacacatatacagtatctcatttaatcctcagaatcttctaaggtaaagccattgttcctacacgacagctgatgaggaaacaggggcagaaaaggtatcgcagccaaagtcacacggaactgagcgaagggacaatgaccacgggcccatgcgctaacaatgaccattttctaaatgtgacgttgctcacccttcattgcaattcttggtttacacaccaagtctttctggccaggccacgagcacctttgaagttaggggaaatcatctcatttaacttcacatcctagccactggcaaaatgcaagcaattagcaggtacctacatatgtttaatgaatgaatatgtaagactgaaagagtgaacaaagaacaggaaaataaccacattcttagccacttgacaagtagattgaccttctctctataaatgatgtgactcaactcacagaacaatccatagaggggcttcgaggaggtgagtttgtcttcaaattaaaaaaaaaggagcaaaacaacaataacaacaacaaaaaacacttcatctccagaagctgtaggttgacactgaaagaaggctctggaaccaggcaaaagacctcaggtttggcaaaatgaggctcccaccctgaactaaaaatgcttctcttgtttcccttttagctaatttctctcctttctgagtctacccaggggggtcggtctagcggatgctattaaaacccacagctgcaaaaggggagaaaaaaacagaggaaattttctgttgcttgtaatcaagggtaaaaataaaagaagcacaatgaaaattaaggaaaataaacagtgatcaaggcttttcttttccacttgcccgtggagtcctgctgtgtgtccaacaataggggaagaacaggactgagatgtgggattccgtcagctctcgctgcatgcaaggacagaaagatgcctacaacaagccagagttacgggactggggtgacatgactctcacaatctccttctcccacgtgaaaggtgaggccatggctatataacgagaaagctgggaagacagtacaggcagaggaaaggagtgatccaggaatgaatgcagcttggtccctggctgtgagacacaggattgcactcagatgtacccttcaaggtatccatccattcagatctcttggggagtgggcttggacttgactggaggctctcccatgaaatcatagataacctgatttccccatggctacctcttctcttctcaagattttgtgctacactcaggattccagcatctgggttctaagctgagatttggcctggacttcccttggccaggctgaattgaccacagcttccaatgaagccaacaaggatgataacctctgccatatgccacgcactgtgctatgagcccagcatacaattcctagtcctcccaaaagctctctgatgcaggtagatttgccctaattttacaaatgagaaaggctcaaaatgaaagtatgacaccaaacacatgaatccatgtctgtgtccttaatgttgacaaagagaaaacctgacttactacccaacgtcattcttctagaaagtggcagaacatagaaccttattctggtctgactgacctggagcccacacattccatatttctccaggagggtgctctgatagatggtagaagttgggcttccagactcactgctagaaataagaccaccaaaagggaagaatcatggcatgagtaggaagtgaattgaatagctgacttcagacatagctgatcagccatgggacacaaaagcagaaagcaataagagagaggcactggaggcctgggaaagtgttagaagcaagaaggataaagaatagagggaaaattggactcgaggtagccaagagactttctcattttcacccataacagatagaggatagagcaaagggaattggaagagaggaacagagcagttcagggtgtgtggttaccttgcagtcaatgtctgaggaagatcagaaattctcagggaaccaaatgctgtcagttctggttcactttgtggtaaacactgtgtagttctgctgctggaagcacccctaccctatcaatgctgaatgctcacagcttcatccttccctgggaactctctcagccaagatcatgtttgctttcttggaggtgagaggacatggctgatgactgattggtttgagaataaaaaagtctggtcctctaacctcagtttgggggcaattctaaaggagcatcccagctcctgggttctcccacagggttgactgatccctcggttgtaactacatcatgagtcagcttctccctctgcccagcccagcctcccccacttctttacaggtgggtgtccatacagctttcccaaataaatcttctgcacccaatctctgtctcagattttgtttctagggaacccaacctaagatactccctgtacctctgtgccccccaccacccttcaagtaatcttgagagaagacctacagaatggaagggaggggtgcaggtaaaaggtgaagcaagaacatcttcacctagcctgcaaacacagcctccccttgtgcaaccagattcctctatggttccacgagccagctgcaagatttccaccctggttctggcaccagacgttcagcgcagtctaattgcaccaaattttatttgagtcttcgctggggctgtcacttcatccaattaagtggaggttacagaaggatccacttgtcattacagcaattcctccttgtgctaaatgcttccagaatcttaattaccgagcaggcaagatcagaaaagatggctccagtggagatggtagtatttctctttcacaaacacaggcaggcccccgagcctgacatgcactacccatgtacagccgctacataaattagacaggcctaaataagtcaggctagagacaggaatggaaacagaatgcagatgaggctcaccaccaggcccagcactgtgtgaaggttgtgcgtccacattgcttgggcagcatggtacagcagaaaaactatggagctaacagctaggagacatgcaccctgtgctctgctctttgactggtgctgggatgtccagcaagcccctttccctcccctgtggcctctaaggtcttaagtgatttgattcctgattatccagcctccactcccactactcacccatctatcccagccacatcaaccaccctcagtcctttcaacatgccacactcattcctacctctagagtttcccactcactgatccctttccccataaaggtcatcttcctactctttaaatggctgacatcttctcattctccaggttttaaaccaaatgtctcttcctccaagaagcttctcttgtccacttaccgaagggagccccctacttactttctgtcgtgatgctctatttgatcccaacaaagtctcaatcacaatttgtaattctatattgttccattaactctttcaaagtccatctctccctgtagaatagtgatgcccaatatggtagccaccagctatgtccatgtgcggctatttaaacttttctaaaaaaaataaataaaatttaaaattccattcctcagccatgataaccacatttcaagtgtttgatagccataagtggctactgagccagagatgccagacagcacagatacagaacattccaatcacagcagaaagctctattaggcagctctggtctatagtatatgcttgatcagtttcattgacccttgaatcgaatctctggatacctatccatagtgcctgggtatatactactcacgcaataaatatgtgagtaaatgaattaacaagtgaacaatgcatattttaaatagagatatgtttggcagagccaagaaggaatgttcatttctgcttggggaagctgtagaagtcttcacagagaggatgacatctaacatgagctttgaaggatgactgcgagaagaaggtgaaggggcaggcatagaacaaagaaaaccacagaggtaaaagcatcaaatgatgaaagatcgtgctgtttcatgcttagaggtttggcaagtttcttgttgcaagtttcttgctgcaaagttgattagaactcaggtttcctttcattgaaagtccgatgcttgggggctcaacagctgaaatatttgcctcagggcccagaacttaaacgtggtggtaaagtattatctctgaaaagaaggaaaaatgtactgatttttaaaattcaaggtgaaaagggaatgcagatgttcatattttaatacactacaaaagatccctggatacttatctcctggcctacatcttccttgtttttgtattgcagacatactttagcatacacaggttgtatagaagacaaagtaccagttttaggatgaataaatgggaacactgatatctcgagaggccttctcagcatggaaacacaatgatgcaacctcatgtggaaataaaggtgctttacttccaccctcacttacttcaatacgctggcacatgcttgctttcaagcaactccctctctagacatggggtttaaccacctgccctgcagatgacgtgtacattctgacatctgcatggaaacaaggtaactcagtcttagaaagccaggagggtggccaagatcacagcgggaggatggagcaaatccttgggtttatgtccctttagacgaggggggttcactctcttctgaaacacgggctcatttatacaagcaaacagatcagaacacattacaggaaggaattcccacggcatgcgctgctctttgctttgccttgtgaagataaaaggaggaagaaacaaaagacttagagagcagagctggtatgaaccatgaagctgctctacattaatcatctccatcgcccccacttcctgctgcccttctcgacataggccctgggtcttttgctgggaaaaggcaggtcgaactggagctggctggggagctcattagcacctcgccagagccgagggctgcctgccttccaggaggcattttgaactctcccttcagttacttccttgcaatcaatatgctgcttttgcagttgctccatccactgcccttgcagccatcggaggctacaggcttctaagaagaactgttggggtttatcaacatacacatcttcacttcacaggaagcagcattccatggtttgcacattggtcctctgggctcataacacagcagggtccagatctggggagaagcaggcacgagggatgtactgggagtagggaggaaggccttggccaggtgctctggcaatgtgggcaggaaaaggccttggtggcaatgggtgttgcatgaggaggtcctatggtcagctcaggcaaaggcccaggagtctcaactgggaagcagaccctgaagccatgtctcccaattcagacctaggggccctgaaacgctgtgtctgagatgcttttcccttactgattcctgtaatgcctgagccagcttgtagctgtcatgcatatggccactagggaccaggagaatttgagttctacatgtggcctggttggccccatccctctgggaggtcatcactacagctgagccacaagatcctgggactgggatcctcatagacctctgggacagtaggttctggggagtgacattgactccaaccctgcaggtgtagccttccagaagccagttcctctctgtaaaataaaggcatataaaggaccactcttagcccttccaatcaccagcaggaacccaagagagagtccctctagccctgagagtctccaatagcatcatccttcttatccaaatccaataaagcaatgctgttcttcaaggcccactgaccacaacctaatggagagctgaggctgccagataccaagacttagcattatagaagggcagagcatggcaggatcccaggggaaaagaattagcacaacctcatacaaaatggagtaataatacacctacctcagaaaatctgctatgagaattacctagatcatctctttaaagcactgtattacttagctttttcttagtgacaaacaaccccgaatcttgatgtacgcagatacttgtttcttgttctcagttagctccaggctgtgtttgaatctattccctatgcctctcattccaggaactagtctgaaggagctgttgctgccaggggcaggttcttccagtgacggatggcagcaggcaacagagcaagcagggacacatgatacctcctgaaatctctcctgggaactggcacaccatcccttctgcccacattctacggttcaaaccaagccacatggccaagctcaaggtcaatggggctttgtcaaagccaatcaggaagtgtactctgcccatggggagggatcatgaagagtgaatctttgcagaaaaaccacacagtgttccagaagtgctcaataaggaattgggatatagtcatctctcagaaaatgttagttattatcaacatgtgtattactatcactattagtaacaggctttgctgatgattcattgaagctcagataaggttgggttggatgagacacagtttggagggctgctacttgggaatggccctgggaaagcttaacctctattgcttggtcaaggtcaagactgactgtaagaactgtgatggagccaaatgtgactagaggagagggaaacggcttcagccaggtcaggcttgacccctgagctgtccttaggaccaggaggaattggaggaaaaggcatcccacggaaaactgagttcatggcagaaccatgacttaaacccagattgccttactctaattctagattaaatccctactccaccctcactaggagaaagaacattttgagatggaattgattcctttctacatatttttctttaaaaaaaaaaactcagtgtttatttttatttcttttaggctgaagcttaactccaaaaatagtctttttcagtagccctgtcattagcagttgctacaaacactatgtcccccacacattgaactgcacgcacgacacttgaaaagagcaattagaacagaagtctcccaagaatcgcaaggaaggcagtggctgcagctcctgatgcctacagtctcccaaggacatggctgggagccagccctgctctggggcttctcgtgcctctctgtgggtcgcccataccctagcatttgctccgttgtgtgcctgactctgtgctaaccccaggagaacttgcagccactcggccctcaacttcactctagttgtctgtccttaaccttaggtcttaatgtagagaggtcactaagcctctctaagtctctgattcctcacctagaaaataagaatcataataattttgggatatttgaggcatcctcatcattttgtacacatcaaagaactatttgatttcatgggagtgccaccaactgagctcctcctatacacagggatactgagaataaacagatagttggacacagcccttaccttcgaacaattatagtctagcagaggttcctgctgttgatttgggggcatgtaatatagtttacaatggtggggaaagtttcaggtaagacttccctgcagggaaaatacatgggctgaattataaaatggttgatgaagtagggaaaggtattccaaaggaaaggagcagcatgtgcaaaggctctgaggctaactagaactatctgggctggtctccagcctcgtgtgcagtgaaaaggtctgaaggaaaagatatcgtgaagggctttgtccacctttgcaaagaagcagcaagtaatagagaagtatccaagccctgcagttgcttcatttatgcaacaaatgtccactgagggcccacaatgtgccaagcaccagggacacaggccgagcaagcacagacccagtgcctgtcctcgtggaacccataacctaatgaacttggcatgtttgctatacatgtgtagtttcaagaagtcaccttggataacaagggtggtggcattggggaattagaatttgtgtggtcaagaaagggggttcatggaaggggttcctgagaactatggctggagagagactatggctggagagagacacggggtacaatttatgcccttctgtgggcaatagggccttggcaggggaagggggcaggctctggcctgacagtaagacaaaggaagaaactaaaagatgaggagagatggaaggagggaaggaaaggaccagcccccagcctctcagccagacctcatcacactcttgtctgctgtgaatctgtggtcacttctcacacctgggaaggtgcagacctctgtatgggcataaaaggaggcgtctgaattcttcagaagcaaaaacatacaagaataacccaaaaggagttgggagggggatttcaaattcatgaaagccaatacacatgggtgctgcggattcaattgtgtcaaccagaaagatatgttcaacacctagcccctggtacctgagaatgtggccttatttggaaatagggtctttgtagatgtaatcaagccaagatgaagtcctactggaagaaggtgggccccaaatcaatgactggcatccttctaaaatgaggaacatttggatgcagaaacacacagagagaagaaggccatgtgacgacagaggcagagacaggaatgatgcatttataagccaaggaacacccaaagatcactggcaaccagcagaagttagaagaggcatgggctgggcatggtggctcacgcctgtaatcccagcattttgggaggccaaggtgggcggatcacctgacgtcaggagtccaagaccagcctggtcaacatggctaaaccccgtctctactaaaaatgcaaaaattagccgggcatggtggtgggagtctgtaatcccagctactcgggaggctgaggcagggagaatggcttgaacccgggagacggaggttgcagtgagccaagatcacaccattgcactccagcctgtgtgatagagcaagattctgcctccaaaaaaaaaaaggcatgaaacagattctccctcagagctatcagaaggaaccaaccctactgacacttggaccttggacttcaggactccagaactgtaagagaatatactgttgtctaaagccacccagtgtatagtagttcattatggcagccctggcaaactaatacaatagtaaattatacctcacaattgtacagattaaatttggatgggtcaacagccttaggggtggcaagttgaagtaacccaataattgcattcagatatacttagccccaccttgcaggacagggccaggaagtagctggtgttagcccgaggggtagggagctgctgactcctgttctggccacatcatctcactcatacctcacaacaaacctgaagggtccacctcactgtgctcactttgtagagggtatgacaggcttacagaagtgtaggtgcatgccccgggtccatgtggcaagtgccagagctgggatctgaatacaagtcatcctgtgacttgcttttgagccgtaaaattataaacaagcagttagttcccgtccacaaagcattcactattcacagaattaagaatgacattcttggctgggcatggtagctcatgcctgtaatcctagcacttgggaggccgaggtgagtggatcacttaagggcaggagtttgagactagcctggccaacatggagaaactgagtctctactaaaaatacaaaaattagccaggcatggtggcaggtgcctgtaatcccagctactcgggaggctgaggtagaattgcttgaacctgggaggtggaggttgcagtgagccaagattgtaccactgcacttcagcctgggcaacagagtgagactctgtcttagaaaaaaaaaaagaatgacattcttaccactctctaaatggtctcacttatgagctcatttttcttctcccctccattagaatatctgcttcaaaatagtcgaagccctgatccatatggctgtttgctgtatccctgtgtctagaagattactggggcataacaggtatttaataaatatttgtcacattaatcagtcaactaatagggggcatttggagactaagatggcactgtccaggtgtatatttctatactaatttaacaaagtggcaaatggggctgggcacagtggctcacgcctgtaatcccagcattttgggaagatgaggtgggcacattgcttgagctcaggagtttgagactagcctgggcaacatgatgaaaccttgtctctccaaagaatataaaaattagctggctgtggtggcacctgtagtcccagctactcaaagaggctgaggtgggaggatcgctgagcctgggaggttgaagctgcagtgagccatgattgtgccacagcctaggcgacagagtgagaccctgtctcaaaacaacaacaacaacaaaaacaaaatggcaaatggtactaattgcttgctgtcctcaatcaaagaatactcaaaggaaaatgttaatgccacacatttgtgcaggctcgacccctgcacctgagagtctgcagaagccatggccaacagctccatggcagtggacaagacaggtgtcacccaaaacattggtgtgtaacaaggcattaataagaaatgaaagggagagataaaaaaaaagcaggatttacagggaatgagaaggaagggagaacaggggaagagaggaggatgtggtagggggaagagaggaggaagaggtaggaggaagaggaactgtttttcaggagggactatcagtagcagcagacactgacaagcatggcagtggtgagccaagttacctgtttgtgaccttttgaatgcataggaatggttgcaagagagagggaaggggcagaggctggcggacactgaggagaggagaaagaaagatggggaagtgttagacaggaagtcagggaagcacagggacaggcagaaagagaagctgagagggactgagactctgaaatagacatagataacacaacttagttctgaacatatttagttctaaaatgggtttccatcagtgtgaaattcattacaacaaaaatttaaggtattaatagatcattctcattgttatttaagcctgaaagcaggagacacaaactacacaccacaacctaccaatcagccctaacacttcatgcggccaactcccttcctgctctattacagaaagtggggaggtgcatgccagtgggagccccacctatgcatgtcctattttggtatgcccagcattcctattgaggggaagggctcttgtctcactttgcatcctcctggagggcctgggttcacacactctggctaaagaattgggcacatgacttagactgggtccttccatctgccactgggcagatggtgggtctagaatcggacgctcaaccctgtcagggataggcagaatccttccctgggactggccttcagacatggggagacataatccttttgcccttgaggttgttaaactacaaggtgtggatctggagatgccagcccccaaatggcccccaacttatcccatcagcatgtaggataatagtgccaatgaggaacaaacaaaacagaaaatgacaaaggagacaaagccctgggtcctcatttgagccctaggatgtgatctgcacagagacagctccatgccagagcattccagggacgtgggccaacaaccttcctctggggttttatccagttagagttgggtggctgccacttaccactgccagggtccaggctgagaatggctcctcatctccatcctcctgctctgtgcagcccctgccgagtcctcctgcccttaactatgtcaatgaccgcacagttttggcaggacaagagcaggactatacgcagtgatgtcccagcccaggtaggtgtcaaggactgaggcaatggcaaaatccatcctggcagtgaaatggagccctgcttccgagatgcaaaagaaaggcagggaaaagtcatgcatctgccagagggaattaatccagagccagtgggggaagaactggcaagtggggctggcagaaatgagctgtgcaaacaggtcctgaggcaactgtctgctgtcagactgctctaagagcctccgaggaaggagagagaggggaggagccagggcaacatggtaggagaccagagctgccaccaagaacttcttcctgggatggcaagggcacttgtaagggcagaaattcatcagatcccattgaggacatttgtatttctatgctataaaccccttccagtaccctaaatcctcagaggtctattataccccaaagaacttgagagagagagtgtgcatgtgcatgtgcatgctggagaaaggataaagaatattaaggggagctgagttccaaatttggaaggtttagagaggacagaaggtgtaaggagtgagagggaattgaggatgaaagtcagaaggaatggtaaacagatatgtcagaagtgaccatagaagaaacccctaggaataggcacaaaggtaagagagagctaatgatactgcaatctcaaaggtcatggtaacttctgttggcatcatggttgataaatttgggactgggtgaactcttctcagatgtagccccaggaatgcctggcatgagcccttttgtgcaaaagcaatcactacgggtatatccatgagctgtcttttctgttcttttttttgagatggagtcttgctcttgtcgcccagactggagtgcagtggcgcgatcttggctcactgcaacctctggctcttaggttcaagcgattctcctgcctcagtatcccgagtagttgggattacaggcaaccaccaccacacccggctaatttcttgtatttttagtagagatagggtttcaccatgttggccaggctggtctcgaactcctcacctcaggtgatccacctgactcggcttcccaaagtgctgggattacaggcatgagccaccacacccggccttttctgtgatttctgaagacagtagggcaattccttgatgacatcatggactagtagtcaaccaagagtcttatggtcatggttggataagagagggtgagaaaggtggtagcttggagttggggtggtaaaggtaagggccataggcacaggcaatacctagacgtactagatacgggtcaataactgctagatatgggttaagacctgggaggagggtaccctgtagtttccttcatctctgcttatctcagaagtcaagaaataaaggcaacagagcctggaattcagcagatgcatgcaaatatatctgaaaaagttggttggtcacttaattaactatattaccctaacttgggacaaacattgaagaataaaaggtggcggtcagctcacagaggtgagtcatagaagaaaagccacagagatgagtgcagatgtgctcagggagaaggagcgcctttcagacaattgaatcccaatagcactgtgggtagatacaatcagctaactccgcctactatgagaccagacgcagcaaacctgcttctgatcactgttcagctcccacaaaatgctgactggaaactatggcattgtctgcatgctgtgggtatctgtccactgcatagatggccagaatgaggtttctaagccatcaaggcgagaagggccacggtaacagacagagcctccctgcagtagcaccacctgccccgccctcacgggttggacaagtcacagttggttcagctttttctcattcccatcacagcccagtgaagttactggatgaggagaggtggtgctgtactccacatagtcattcagggacccaggctccgatctggagctgctgcctgacttaatatgtggtctcaaatgtcacagcaggaggggaaaaagagagggggcttgcataggggagttttttaataggtctggcccaaaaggagtgtatatcacttctgcacacactcctctggccccatctgaatggaggaagcttgtgtgcccagaaggaaaaataaatggtacagagaacgtaacattgtcacacgagtctttgaactttcttgctggtatgaagcaggtcccacactctgcgatttccacactttatttcactgatcctcagaaaacatgaggcaagaaacatccttctgtccctttctacagatggagaaactgaggctcagtcacgtgcagagttgcattcagcaacataaaatgaacagagccaagaatgaaccccaggtttgcctgcttctaaagtgcagcctcctcacctccccttacgaagggcctttccaattgcttgctcaggcacagcaaattgcagccctgtcttgctggggtcccagcagttcctcactcacgtgcagaagagattaaaagaacaaaccacagagcacattttgccgctgattaactcaaagaggaggctttccctcactgagaacagatgatcagctgctctgccaataactgcctgctccgtaccaccaggccgcattccatcaaaaaggcacagtttccatttactgggttgaaagtgagtcacatctgcccctggatagacatataaagcaacaggcatgctactctgattaataatgaaaagctggtgcaagcacatttcattttaaaagagaagaggccaaatcctagcctccttttctaccaggtttaggaaagcatgaaaaaggagaaggatcatatgggttaggggggaaaaaagaaactttaaagaagcaaagaaatctacctgcccaagaggtgggaaagcagagattttattctattctaggaaccttgtgattctgcagagctgcatcgtttgttttttatactattttagaaaggaattccattgttttaaggcgggaataagcgtgaagcctggccttagaatacaacccattattttgacaaatagtcaagtcaaggccctgagcaatggtcacttaagtctaattagcaggagaatgaaggccacatctcttcttaggtaaatgtccgctaagcacggcttctgagctccctggatcaaaatgagcacatgttgtgcaaggggcatgggtgaagtttaaaaacaatacaacgtgagcatactgaacctcatcgattacattgggaacccacagccaccccaactgttgagatacggctgttttcggcatctgcttcctgagaattgctactgttttgttttttcaatgtttgaatgtgttgcgacgatttcttcatgagaatcctttctaaatgattggcggtgcttgtttttgaactgcaaaatcttttactctacctccttttctccacccacccacctgcggttggagtcactgggttgccggtaggtggaccaactggcttgggctggaagctgggtgaggccaggtacaaggacagttcccatgaccagctgggctggctgggactgttcacctggacaccctacctcatgtaccaggccctgcctgacaggaggatcaccagtcctccgactcctagtgcaagacctacccttcaggatcagacttccaagctgccacatctggccagactctacctgagttcatgtagttcttgggcttcgtggccatagccaagtctgtctctaaccccttcccataacacagaacacacaatttttgccctcatgtattctggaatttgtaaagtctacatcaagaaagaacatttgggaggagactttaaaaaaaaatcttcaaaaacaatcaatacgtgacaagaaaaagataattgctcagctttcagatcgtacagaatttggacgtttaagcccaatatcagtgggaaaggaagaaacatcttcccatctgttttcaggtaggctagaaagttttcattcaagacattaagcctgtgggggtttctaatggctttttttgatccaaattgtattaattaggaaaatactaattgctgtaacaaataaaccccaaggcttagtagcttaacacaataatagtttattatcacttcaatattaataacaggcctgcttagcagacaattttcctccacaaggtgattcagggacccaggcgtgttcaatcttttgactctcccctcaccttgaaattgtctgcatccagctaaccaaagaggggggtgagcagatgaggaatgactacatgctttttaactctttgactctgaaaggacatgcagcagttctgctcacattccttaaactggaactattatcacagggccctagtgattgcagagcaggctgggaatgaggtccgtggttaggcagctgcttcaccactttatcctatggaagggaggcacatgtgcttggtgggcacttggccagctttattggcctgaaaggtagcagaaaatttctctcagatctcggaaatggggagtcagtctgcatttaccttttgctgtatttccctggatagttagtggggaaatggcagagggaaggccaagcatcactagtcagagtaaaccagaagacatatgtcaattttccagaaagggattctggggctcaaataagtggaaccacttcttcacagccacgtcaccagctctgccttcccatccatacagctccattggccagaggcccacagaggaagtatcttcccatccagtttctgcacctggcgtcctagatgaatagtagggcactaagtacaaaagccttcccatggggcaggatctgggccagtacgactggcctttggagctgggtcattctttgttgtcagggggccatgctgtgtatcgtagggtgtttaacagcatctctgggctccacccactagatgtcagtaccccccctctcccatcgtgacaatccaaaatgtctccagacattgccaaatgtcccctggaaggaaaatcaccctcaattaagaatcactggtccaggcagaggctgcagtgtttcagagataaattaggctccagtgactggacaaaggcaatgatctagagcattcttactaaactggagcccatgggtttaactgagtttagcctagcctggaacttgggttctcagaaaaaatattccatatatatctgtcacggaataatacattatggaaaattagcataaggagggtcagaaaatagtctcatttatgggctcattataggaagagggcaggccttggactgtgtgactctgatgagactgggtaatcagacttcagcatcctcagtggtaacaggggaccatggtgaagattaaatacaacctcatgagaagacagtcagtgaagtgtctggcatgcaataaatggtccacaaatggtagctaactacagactttgcagcttgttccatacctcagatcattcttccatttgaacacaggagggtaatgttccaagtgaatgagaatttaatgcagttgccatttgatttaatttccaaatgcgttaaaagtgttaatgcaacacatcagcatgcagctgataaagtagtcaaaataattcaaggaaaccaatacttatcaggttttatttatccacatttacacttttttaaaaataagctggtctttgtgcccatatagattacaatatacataatatctcccggttagcctcccctccacacatatgttcaagtgaagtttcccacttttctcccatctgtcatttttctctttccataaaaagctaatggtgacgttatcaaagagtgaaggagtcagaggctaagggtggggaaccgggcacccatgaggaggatggggaatgatgaggagaagcacaaacataggcacgcactttgtttaggaacaattttcatagccatggcctctgacccaaatctaggggagccggcattattattccaattaggcagtcatgaaatgatggtcctaatccacttagctaacacaaggcagaatcaggatttgaacccgagacctctgatttgctatctatgtgttcttgacaatagcagtcatgggaaaaaaaatgatgcaagtattattaataaaagttaagaccaaagaaagattaaaaaataagaaccaaagcaccagcatattttcctacaaagaatgaaactcacgcagaagatgagcatgttgaggtttctctgctttgaaatagggttccaggaaagtcaagatcaggcatgagatgagaggaggaggtaagctaagtctaccacaaaaaaacttccagacctaagttggagcatatatgatccatatgcagggctcttgggggaatgggtagaactcacactgaggcaagccttccttgaaaaggcattgaagaaggcccaggagtttttaaaatgaccactctaaggggcacatggtggggtgggtaagtagcatggctctggcagggcaactgagccccctaaatttgtagccaaatcagagcaaagaaagaccataagaggagcacagggaattacaaagctcacagctcccataagaaggaagaaaagaattaaggaaacgtaatacttaaaggaaaaggtaaagaaacagatacctataaaggagacagaactttctcagaggtagaaggaaaaccaggagctcaatcaataacgagaaccttaaaaaagaagggatggtgaggggtctcgtcacatgcttgtaaagtaaggacctgagcactcttccctggatacagcaaatgtttaagccccttctatatgccaggtactgactcaggtactgctggtctagcaggaaataaggcttacaaagcttcttcctccaggagctcatgttctagtaggaaagatgggtaatccacaaatagatgtaaattacaatgtcagatagtgacaagatctaggaggaaaaccaaagcaccctgcaaaggaacagagttacaaagggaaggggtgggaggtgggggagagtgttatttcagataaggtaatcagagggggcctctctgagaagctgaagtctgagcagagaccagatcgataaaacaagtgagctacataattatctggaagaaatgcatgtcaggcaaagcaaggacagcaagtgcaaaggtcagaactagtttggtgtggttcaaggaagaggaaatggatcagcatggctagaaaagagaataagagggcaaatatgggggtggggcattacaaatcaaggactagatatggagaccatgttaagaagtttggattttattctgagtgtgacaggaaattctggaggcttttcaacaggaaaaaagccattatctaactttttcaaatgatcactcaggctgctgcattgagaatagacatcaatggggcaagagtggagcagggaggaagctggaatagtcatgcagttgagaacagaatagagttttgactcatgcactgatcagcaaactgtggccaaatccagccctctgcctgtttctgtaaataaagttttattggcacataacccatgctcattcatttgcatattttttatggctgtttttgctacaacagcagagttgagtctttgctacacagatcatatgacctggaaagctgaaactattgactctaatgccctggagagaaagtctgccaaccttgtcgaggatgttgacaatagaggtggtggaaggtggcaggctctagataaacttaggaggtagagcagaggccagatgttagcccaggctctctgataccatgcctgctctctgatcactgggtgatatagccctccagctcctctttacttctgaggacttgtggagaacgtgaatggaaactctggagtccagtctgaggccagcctttgctttgttccactccctatacaagcacagagctcaaggtggctttgcctctcctcctagcatgagcttgtcctccatggctgctgccaccaaggaggcaggagccagcagccttggtcaccttagaaggccacagaggctgtaggatccctgtagcagaagctgttgcgtcccaccgccacctcaggacttattattgcaccgagtgcagtccaacctccaactgcctctgccaactgtcaaatagctaatagacatgggcttctgccaaagccctggggagcggggggttacatcctgtatgacaagacagtaaagccagaaaattaagacccccaagagcagctctcaaccaatgactggagggggttaaggtacaaataaccccctcctccacaccccaggggttctacactgaatcccagaattacctagtaggatagagctccagacggtcacagcagttactcacttgagaatgtaccctttattcgctgcccttgattctctgtctcatgtccctaaaaccaaataagcaccttgcactcggaactcctgccctgagtctgcttctaggggtctcaacgccatgtgccttttatcttcactcttcttttccaacgcagtctgtgccagtgaccatagccagctgtctgacaatggtttttccctgcaggaccagagaaaggaagaacagctggatgcagagatcccaccttatgagtgtgcacactactatccatggccatggatagggtccgtcacagcccctagactactacaggatgaagcccaggctcctattctggtacaaagactctgcaaatgtccccttgcctacttatccagccccaaacatgtcacccactcagtgtctcaaaactaacccaggctgtcctgcttatgagcttgccaagccacaggacccatctcagatggggccagtcggagaggctatcccagactcttccagactgcgctcattgttccaacctctgtacacctttagctcacacctgaatgcagggtctaccatactggattttgcaagaaatgtggtataaaagagacagcatggccaaggcaaggcaagcctagctctgccacttatgagcagtatgatcttagaaaggtccagaacctctctgggtttccatgctctcactggtaaaaggtggttgctaacagcacctacgtcatagggccattgttaggattagggaggtagtgtggcaggtggctaacattaactgaccatgcagcacagatttgcatgattcttcctgctagaccatgagcttattacagaacctgacacagttgggctccataaacctttattaagcaaatgaatacaggaatgagtcagctactccaggcattccatctttaaactagaggctataaatgcaaatcactgctggcaccagactagtgagagagcaaaacgggaccagccaggacagcagtcaacggtggaacgtgtgcttccaaaacagggacgctgaggagcccactgttgccatcctaaaatgtaggctccaggtagctatgcctgatacagtctcaagaaacttgtaaatgctgaaaaaaaacttaaaaaggaaagagaagacagtacaatgtaagtaaagcactttcgcaactgacttcaaacaatggattggattggatgacctcaatcccatttcagaagagggagaccttaagatgatctaaatttaaattttcatagtatgtacagaatatcattcctttaatccaggaaaacaaacaatggacaatgtctttgggaaacattccttaatagtaatgtaaaaaatatgattactactaaagacataattttatactttctagtactaggatgtatctgtttatatatgttacatatatattatgctatatatatgtgttttatatattatatgtatgttatattttctccctctcataggacctatttatatatattcacctccattattcagataaggaaaatgacgcccagagtaaatacatgatttgctgaatcacacaggtaccagggagcaggactaagatggaaactcaagtgtatttagaacaataatccctactcttgatcctaacaacctcccttggtaggaagtcacatcagtgtttaaatcggaacctctaacagcactagtatcacatttcttctgagcactaattctcatactgatgagtgttctgagtgcataataggttgttaaatggagttgaaagattggtttaaaaatcaccaccgacaagaaactttttatgaattagaaaattttcatcaagatacatctgcataactttggttgcagacactcaagtccttgaggccagctaagacaccttgaaattgaagacactcagaaaaccagaagcaaagcaaatgaataagcatttgctgagcactggtctggaccaggtaggttgaggggccgaattgtcaattgagcgaaacctcaattacagagtaatctaatgtatacccaggtacattatcacaactcaataaacagctccccagaattaagtaattccaatttgctttcatttcggtctgtgtgtcgccctgagaatttgatattacctaccctcacattaggcagcatcttctgaagtgctaatctttaccatctcaggatcacacgtgagctgtgagccagtcagccatgaatacgcctgtttggggagaaagagagaccagcctgggcctctgctgttcctctcagcctgagtacctgctgtggaagccagcacaggggtttacagctcccagaaccctcgggtgctgaagggcccagtgacctcccaactgtggagtggttagggttttgaatgaacaataccaggagaggggtggtccatgtaactagatggctgagcacaaacaaaactagctacttttcctttgtccccagacccgggaatcagctttcccgatccagtaggggtgaacacaggaaaggaccagagaattctgacctacagggacttgtgatggttaatattaagtgttaacttggttgaaatgaaggatgcaaagtattgtttctgggtgtatctgggtgtttctaggtgttgccagaagagattcatatttgagtcagcggactgggagaggcagacccaaccacaatgtgggtggacaccatcccatcagctgccagcgtaactagaaaaagccggcagaagaaggtgaaagaagcggacttgctgagttttcctgccttcgtcttcctcctatgctgccctcgaacatcaggcctcaacttctttggcttttggagtcttggacttacaccagtggtttcccaggggctctcgggcctttggccacagactaaaggctacactgccgagctttcctacttttcaggttttggaactctaactgagccactactgtcttccttgctcctcaacttacagacggcccatctgggtcttcaccctgtgatcatgtgagtcagttctccttaataaactccccttcatatatacatatatcctattacttctgtccctctagagaaccctaataaaagaccccatgacccaaatgtcccccagtccacactttcatatttcctccctccctcttcttatactcggcacatcaccgtgtaccaacagagaactgggccacactttacagaacaggcctgacatgatttccccaaagccacagagacagtcatcaaatcggcacctgggtccaatgtcctgtccccacccatggagtccttcatctctcttacttctttgtctgataaatcccacccctatgggcaatttatttattttatttaacaaataccttagagtgcctatgcagggcactgttctaagaactcctacatccattatcacatgtcatcctcatgacgccttctgagggaggtaatcctacattcctgttcccagatgagccagctgaggccccaagaggttagatcatgttcaaggtcacagagttgggacaaggtggggccagaattcagacccaagcatcttggctgcagagttatctcctgccctgaactggaaccaaagggtgggaacctgtgaggaggaagaccttgaagacatggttttctttctgtgatatcccagggttgtgggtgacgtcagtccaagaaggaatccagatcccatcccataacacagcacttggcccttgagaatcctttttcttttttggtctgtttttcagattttctcccttctctgaaagaaggaggattaatgcttttcccttgtatttttttaaacaagtacaaatacttcagtattaaagtacttaagcatcctggctccgcaaaggcaaagggctcttgagaggtaagtgagtcattcttcatcacacagtttcttccaaacgcttgggtttgctgccttcaaatgggtccctgggcacccactccagggtgacaggtttcctctggttgcttctgctcctgagggggtccctgccttttattttcttgttttgcttggatgccactaactctttagcagtgtgtttggggtcggggcagggggtgagggtaggttaaatgtatttctccagcaatctggaagttagctgacagtcaggaagggaatatcacgtgtcaaaatggcaagttagctagacggacccagggaatcctgcttgcctggtacctgggccccttcagcactgctcatgacattgtggcaccaggtaacagcaagaccacaacccaccagccctccaggtgtgaccaaacagcatgagccagatgcaggtcggactccagttgtaccccttgggatggtcctgtttctcaacctggctgtgctaattctcccactcatgaaatgagttaaaataaaaccaatgtacagagctgcaattaggaaaaaatcaggtaacatatgttgaagggacttctttacatgcaagggaccaggctcctagcttaccaccatcataatatttaaatggaggaaaaatgggcactaaaaaactgataacctatgccaaaaatatggatgaatttcatcgatgtgtaataaaattacaccttgattgaccagattacaggaagtgccaaccccccactgttcaatgtgaaggagactgggtgccacccaccaccccaccctccctaagctggagtggcaggggctgcaggtgagtggcttcagagcagtggtagctgcggagtcatattgccaggcctggctactgcacccaggctagcaccagcccctcctcttgacttgggcccaggatgcacaaccagcagaggacaaatcagtgtccccgtaaaccctggccacctctccgaataaagcaaggatgctccaccacatcctctgtcccagtagcctcttggtttctcttcccatagctcccatcctgcccctgaatgggggcatataagcaaataataaaccaagcgttttctggttccatttgtctgctcatgggaatttcagagtgctaaactaactcccatagccactggtcacattcttttgccaccaactttgccccatgtacatgcaaggtgctagcaagaccatgaggagcgggaatgaacacagcacaccctctcctgggactctcaatctggtgtgggagaccagccacggaaggtataagacacattccagcaggacatctgaaaatacacattcactgagaacctgaatggcctgcaataacccctgtgtcacataatacaaatataataataataaatcttcaaaaaaaattttttttttgagatggagtctcgctcagccgcccaggctggattgcagtggcatgatctcagctcaccacaacctccgtctcctgggtttaagcgattctcctgcctcaacctcccgagcagctgggactagaggcacgagccaccacacccagctattttttgtatttttagtagagacggggtttcaccatgttggccaggctggtctcaaactcctggcctcaggcgcatgccaccacacccagctattttttgtatttttagtagagacggggtttcaccatgttggccaggctggtctcgaactcctggcctcaggtgatcgatctgtctgctttggcctcccaaactgttgggatgacaggcgtgagccaccataccgggccacacaaattaatcttatggcatcaacaaagcaaagataggagcttaatgccatcaaagtggtggcttcttttctatgttaataacatttaatgtaaacaaatttaaagatttttaaagttttttttcataagtgcctaacttgttgatctttggcttaagtgttcatggcattgtggtgaggaaataataaactcctgctgaggccaataattcattcactcttctatcagtccacacattttttcaagttgagccttgtgaaatgactgattgtgcaagtcaaaacaggcgaacactaacacttcatatggtttagcaaactgagaaccagtgccaggcactgcgctgagtgcagggacttccaacccagcagacagccctcctctcacagagcttagatcctaaaaggggagacaaaaagtcaccaagtaaacaaataaaggcaaaccagcattttaaagtgtgataaaaactatgtggaagaggagaccaggtaatgagaaggaactgtgaccaccaggaagggaggtgtgggcggggggtcagggaagttctctgggagaagacgacatactgccatttcagctgagacctgaatgatggcacatgatcagccatgtgaatgtctgtatgaagtcaagacagccagcatagagaatcccagcctgcaacccccagtccagttggcccaaggatcccagtcacactgggtcagcaaaatgaggtcaaagtttccacacccacccatactttgacaaaggaaactaacttaggaggcctcaaaggctcgatcagtggggttttttttgtttgctttttgttttttcccttcaaacacaccaggtctcattctacagctagcataataagaaaagcttcattatttcattcactaaattatgctatattaaaattttaatcggcaaacataacattggtaaaatgagtacatccatacactgcagttaccagtgtaaactgtcaaaccatttttttttttttgcaaaagcaatattgcaacacaaagaaaaatccataaagatgctcatattcttggcctcccaactctacccccagggaatttatcctaaggaaataatctggttcaatagaataaaatgttctctccagaagaactccatggaggtgctaattgttacatacacaaaggaaagaaaaaaacaagacacgtggaattatcgaaatgactgcaaatgggggggtttaacaaaataggataactcattggatgagatagcatacgatcactaagcatcataacaaagatgacaaagttgcagaaagaaatgggatatctggctttttgagagaagcagaaaacaatctgcatattttaatggaaagcatgtaaacagtatctcaaggtgaacaagaacaagaaaattgaaaagaattgaatcaaggccagtggggtgaggaattattcatttcaaaagtccttccaaaatattgtcattgtattgagttttcaatttttaaaaaaaaatccctcagaaacaatagtacgagaacactgccacagcatgccacccaaatacaaggacatttgttcattctaactttaaatacaaaataaagccaaatttgaagatgtcttctgtgttatatattccacagtctttcacgtatggctcttgtatgtgagactcaagttggaatagcaatgcaatgttgcatgattttaccatagtttctcccgtttggggagtttgtgttggggagggaggccagagtgactagaaattaatctcctcttttactgaatgtgggggaggatcagcagatgagaaaaggggctttaaggcccattaatgccaaccttccatggcagtagaggcgcaggctggaggcactcacctttcacgatcagctccgcgtagttggacacaccagacccaccatcagagcggatcacacagcggtacttgctgacgctccgctgggcagtgtctgccacactgactgtggctgagaagcgcctgtggttgaccacacgggtgaccatcagggccgtgtccctgccattccattgctgcagaacagaggaagagagggagaggaggaatcatagcatcataggcttctaggtgactcccaacacggatatccacccatcctcacacccctggggctcaagactttccactataataagggatttccagccaggcacagtggctcatgcctgtaatcccagtgctttgcaagggctgaggcaggaggatcatttgaggccaggagtttgagaccagcctaggtagcaagcaagaccttgcctctacaagaaattttaaaaaatagccaggcatggtggcactcatcttcagtcccagatactctggagggtgaggaaggaggatcgcctgagcccaaaaaccaaggttgcagtgagccatgatcaagccactgcactctaccctgggtgacagaggaaggccctgcctctttaaaaaaaaaaaaaaaaaaaaaaaagggcaggagttttcatggctggtttgtgctaatgagctgattcaagaataaactttgctagtgagctgatttgaggacacaggcctggtggtaagaagagaggaaaaaggctccttctaaacactttggctcagcctgcatttggggctggcatgtagccccttaactttcctccctattttcctttttcccttaagcagaactcatagcattctttcagacaaacttcagcagacttagtgaaaacccagcccatggagaataaacaccgcctggctcacaggccctgtggctggtgccctgctaccccaccccacaggctctgagccccacctgccctaagctatcaccacaggtagggaggggatgggagccttccaacacctctcttccttggcacatgctcttttctctgcctggagggtctggtctccctggggacactccgtcttccgtaaaaagccacgttcagctcacagccatctctagtcagttctcacaactgtcacaccatctctggaatcttatctatgtatgatacaaactttccacacacatttgcccacaagtgttgcccattttacactgaaggactttcctctgttcatctttagaagcttgtctgaaagcttcccaagttggtagacatctctagaatcaaggtgaatacacgtgggcttttgtcttcagcatcctgaatctcaggagggatatcctgagtttgaacaaacctctttcacagttgcaggttatgagaactggtaaggcacatgcatgttggtgcagtttgagtggatgtttattaatgttattaactggatatttatctactatgtgccagcccctgagctgggtatttttgtataaatcttcattgtgtcttcacagccttgtttggggagtgtacaactgctgctcttctcagaagaaaaatccaaatgtctaacagtttaactaaatgtgtagagtacacaagccccttatccaggttttccaacttcaagtcaagcactgtttttactaagaccatattctcagtgcctgctttaatttgaaaacgtttttccccaaaaagtgaaattgactcctttaattatctggacttagggaaaccttatgacttatgattctcatgccctgagtctcccagtctcgcaacgcgatcttcattgtttcctgcaccaagtaaacagtttccccatgtgcataacctactttcatctatgtcatctttcctcaccctctacagtgacctgtcaggagaggggcacaggtacaggtagagccacactgctcagctctatggcagcaaatgaggggagaccaataccaggggaaggcagtgatcatgaaggccagaaacccagggtatcccaggcccccatcaaagggcagctaagagagacttgctccaggctacaggctacaggctccaggctacagggagattgtaggtaatattttgctgctgctttttactttttcacattcttcaaactttctgtctcaaacacgtatttgctttatacttgaacataaaaaaaaatggtattgttcaaaagccatggcagaatgagaggcagccataactccctctcatgccagaaactaaccaacatgtggaatagttagtacacatcagagcaacatgcatggggctgtaagaggagaatctgaagccaaatgccagctctgcagcttccaagctatgcagacttgagcaggcaatttcactgttctgagctggaaagtttccattcgcttgcccgaataaaaaccagtacaaggtaatggaaggggagaaaggtcacttgggcggaaactgccatccagcttcctcatgccttgaggcatctttgcaggagatggcacaacttggaccccactatgagaacctaggagacaccacatgcaatgccccggaaattcccaaagtagtgcagggagaaaggcgggaaaattccggcaaacaccaggaatgtatcctgatttggagaagagatcacttaatgaataggagggccttggaagcagggggtcatcaaaaggagcccatcttccccactgctgagcaaggcatttcagggccaccatgggggataagaatgagttagtggtgaggctttggctcaatattttctaatatgagttatttataacatcataaacacttttattttttctttattaagctaataacagctaaacactactatgtgctaaatgttttatatgctttctcatttattccccatgaaaaataaggtaggcacacttcttatcgctgtcatatataagaggaaactgggctgggcgtggtggctcacgcctgtaatcccagcactttgggaggctgaggcgggcagatcacgaggtcaggagattgagatcatcctggctaatacggtgaaacccagaaatcaggtagcataaaaatgcacagagatacaaatgttaggatgtcaggaagatggagcaagacattgaaggaaagcccaaagtcctgggaaatgccacaaagaagcatagcaaggatgtgtgcacacagaagtccaggaaaaattccgtcagataaggcccttatctaccacttggcttctcggaaattttcttctggttcctgcagtagtttttcagatttaagtatatccttcctctgaacttttagggcatgcttcttttccttctgtggcaagattttcaagtcaatatgtgtgttgttctaaagtgaaatcatcgtctggccctctgattccacgagtcaactcaacaaatgtcccagtgggccccaacaggtggtgtctctggttgggctcactggaagcagactttgacacatggagatttatcaagtgctttcaggagaaaggatataaaggacagagtgagaaaaggggctaagaaaggatgagatcacaactggagtcaagctccagcctggtcccacaaggagtcatggagcatgaagtgtaccccagagtggatggtaccttgtggttgaactactgtgtccatcagtcattggtcagggctcacgaggcagagagaggaggaaacttcttacttgacggagggcagctctctgggaaaaggaagctgtgaggctttagcagccgacatgcccagtgctctagggttgagggcacttgcctgcaaaggggatctgtccaggacactaaaagcatgcattccacttggcactttcctgtctctgccttctcctacagtaaattatacgttgggtttcctgaaatccaatgagctactgccttgagattttctggcagtctgtttctaaatctgctttttttttttttttttttttttttttacacatggggctgggaactgacctcagtagcacactggcaataccaggtgtgagcatagctgtaattaagcactgcttcctatgaaatgtcactccatctcacataaataaatcactccgtagctgagcttgataaacattttgttcaacttaacaagatttatctgagcgtttatcaagtaaaagtcacatcaactaacagttttgaaggctgactttgtgccagccactgtgttaatggcttacataatagactgttcacttgatcctcttaaagtccctgtcaaagttcttctcaaagagtggtccctgaatctacagcatcggcctcatctgggaacttgttagaaatgtaaatttgtaagataattctagggctgatatccacttggagatgttgtttactggggttgatagtctgaggtttttcccctttctccattctattattaatcatgctgaagatgtactcattattttacaaaacagaaaatgaaagagtgtggaaggtataatttctgcccagaggaatttataggctggattaagattgtaaaaacagtagaaagagtaaaacataaacactaagtcgagcattgaaatagtatacttcatggaggaaaacaggtctggcatggagacagaaatgctcttagaaaaatctagagctatggttctcgaaccatggtccccagacaggctgcactaacatcccctgggaaattgttaaaaatgtgaattctcaggccaggcacggtggctgacgcctgtaatcccagcactttgggaggcccaggcaggtggaccacctgaggtagggagttcaagaccagcctgaccaacatggagaaaccccatctctactaaaaatacaaaattagccgggcatggtggcgcatgcctgtaatcccagctgctcgggaggccgaggaaggagaatcgcttcaacccgggaggcggaggttgaggtgagccaagatcgtgccactgcactccagcctgggcaataagagagaaattccatctcaaaaaaaaaaaaataaaacaaataaaaaagtgaaatatctagcgccatctaataaattcccagacctaatgaatcaggaactttgggaatggggccaggccatttttgttttaacaaaccttcctggggattccaatgtctgataaagtgtgagataagtcctactagtaattcctatttaatgaataaggaaactgaggcagagagcggtcaagcaatatggcttttagtagtacttctcagactacagcatacaaaccacctggggatcttgttaaaaatgcacatcttgattcagaaggcctgtgatggggattggaattcttcaggtcttgctgatgctgctggtccatgaaccttactaggaggaacaaaacctgatatcactttgctgaggggctgagttaggattggacccaggtgatctgataccagacactgagacattaatcacatcacccatctgccacctagtactaaacagtacacagctacacttagcaactctgtgaaaggagggtagagagtgcagtgttccagaaacttactttgtttgttcaaagaatatctaatgataacttgcagaaaatgactgcttcacagaaaacagttttggaaatgctgtgatagaagcccagatgcctagcattctggaaatcttggaagaccttaggtcagaaatatatatgtaagaaggaacagagtatcttcctatattcttggccatcagattcttttaatatattattaagttatggcatacctggtatactattaggttggggtgaggtttccttatccccactctttcagactagaacagtagttcctaaattttaatgtgcatcagaatcacctagagggtaatttaggaggtctggggtgaggctggataattagcatttctaattggttccctggtgatgctaaattctgctgactttaccctgggtctcaaggacttaaaagctgatgtcctcttaagtcccttaatggaaagcaaggggccaaataataccacagaacacatgaatggaaaaattccttaaatctaagaccatgtcctgaggatgagcaactggtcactgcaccaacagtgcccagctaagaggcgggagttgtggcccccaaacccaacccatactctattggcagagccaggagttctgactacagccatgagtccttactgagcccccttggagggaggtcacttttgtgctttgcccaagggctctatctgcatatcaagctacatatctatggagctgcatctgcccagaaggtgaaccccttttcttccaattcatccgtacaggagggatacatgttctaaattgaagaaaggcattttacagcctaatcggtggttctgcttaatcccattttatgtttatgtttctctgattatgttgcctttgaaatctctctttttctttcccctttttcaactgcttgccttgctctttaaaaacaactcaaattccaacttcccttggcttactttgttttatgtggataagtcggcttggtttgagagcacacactcattggaagaacaggagctgtaatagctacactttaatgttctgtccccagcacaagtgcatccttccacccccaggcaagacccctctattttcaggaaccacctaaagaggaaggcaagagttgcacctgatgccacagagagtgctgttttcctaccgtctgattatctatcaaggtttctgtaatggccttgccattttgcaattccccatccactctcctttagtgtcatgacattatttccttcacaaagaggtaagacaagactacaaaaatggctgtcattatttcagaaagagcaggaagccttgaaattgacttgtaattggcagaagtggaaacagtactgtctttaataaaaggaaaccatttctggttttgcacaacagatactatgcctggtttacagaagatattctaatgcaggatcctggaagccttcagtgtgttggtttgaacttcttggcatcaaaataataaaaaaaaatgataaagataaaaatataaaaataaaacaaaataaaattaggcccagcatttccagctgtcatttgttccaactgctccaggaatttcctggccagaaaatatttaggtgaaattcccacaattcacttgtaatgcgtattcttttcacttctagtcaccctgctgccacggcatgacatttagaaacttgctaaaatctagcccattgattctcttaagatcacatttgtacctttttggcagtctctaaagaatagcttttgattattctttattaaaagtcagaagaaatagaagtagacataaatcatttttgattagctgtgctgaaacccttccaagagccctctatgtacgtggctgactgctcattttgggttgatttctgggtttagaactcctgcaaagagtcaggagggacctggcataagtcccacagggcttggtgggggacaaaggaaactaatgagaacatgaaacttaatgctgcttgctgtgtggtgaataacaaagttctttgtctctgacccagaagtttcatgtcttctgccagcatctatgaaactgtggcagtctaccttgtgagcctccaaataaggtaaaatcttaggcctttcatagttattgatagacagtttcaagtgggcagtaagatttttgtggagggagcagtcagtatcatcaaatctgaaaagagaagtataaggcctgcgatgcaccctttggctatagcaatgaggaaagcactggggacatttacaagggccactccttggaagaggtggcactgaagaaagcctcattccaagtgtagacgtcccatttaaagaatgtggctaggaaggggataagagaattaagaaggcaactagggggtggggaggcaattcaaaaataattccaagggcattttatttcattgatctcatgtagatttgagaaattaaaatatacttaagtatctggttcagcggccaataaatttagaagtgtataaatatatgctaaataaagaaatctgtttttaaatagaaagcctcctgtatagaaggaaaggctggagtgtaacccaaggtgacagggccatgaggtaggcatggaagaatgagcccaggactgagagacaggacctatgtttcttcacaccatgcttctgctgctcactgcctgtgtaattccgaggatgtcatctacccatctaaggctcagtctcctcacctataaacagggctacaatcacatctaactgaaagactggttatgagaattaaatacatcctatgtgtaagcacttagtaaacatcagctgttaaacatagtatcattacattatcatcattgcttagttgcagcgtgaccactagattgtcaacagaaatgccacacagaagggatgcctggttcagatgcaggcaggtaggtaggaggaggagctggtccccagaacactcacagcctcagaggccagcagcagccctgcaggagcaaggaaacaggtttactgggcgaaccggctgcagtaaagactgatatgcctcctcagctcatcaaccctgttgcagctgctggagtgcaggcaggaaccttttcctatgagattcagatctgctcccagtccagtgaatgcaatttgtctgaaaacatacactgtccctacagagatctgcacagggcgtttggacacatggcttcatttctgagactcttcaaatgttatttgtcataaaaacccctcgtggattgaatcctttgtagggaggcctgagagtcagctccatggtggggctgacagactctgctctggagtccctgagtaattcaaggaaagagccccatccaccatgctccttgataaagacaggaggacacacataaaatatttctaaacatgcttctggatgagtagtgtctgatggtgatgatgggggtgtgggaaaaacctgtgtcctcactgttggaattagctatgccaaacccagcaaaggcttcttcgtatactaggagtattctgtaactgggaaaaagtgaccatttttctttttttaatagcattttgtttatgttagtttcctgtattcatcttagaatatttggataaaacagaaaagaatagcgatgaaaataaaaagcttcataatctattattacaatcaagtgtcttaatatgtatttcatggagttataggagtgtctatgtatatacatatgtatatacagattatatatatttatatattatgtacatgagcatgtatatgtgtatatattttttcataaagcttaatattatatgactctataactcatccttttcacttacatgttatgaaaatgttaaatatacttctaaaatctgatatttaatgataccattccctcatttacttaatcagtctcttttgctgaaaatttaggttctttccagccttttgtcctactgaacacaattgcagatacatttttgtccccatctctagatatttccttaggtaaatttccataagtaaatttactcattggaaaaatatgcatatttaaggctttggatatcaactgcctaattatcttgcagaaaagatgtacacatttatatttgctctgtgctacacttataattatgttggtatagccccacctagttgtatcctgaatgtcattttttaaatggactccacaaaactgtagaccactttgtttagtggctattccccttggaatgcacaccatctccttgcttgaaaaattgcttgcaaagttacatgtctggattcctcaggccaaagtatcacataaggaataagcaagttatgactgagccccttccaccacagaccacggcatcatacacttcacctcaaggagaaatgatcccaggacaagaagaacctgcttataattttttactagccttctatcatccttttccctgattcactacaattgttctaggctcatgtgtttgcatttctgcatcggtcctgtccattgactctcatgtagaacttgtactgtaattccacaaaagccagcaccggcagatgggatcttctaaagacatataaagtttccagaggggtgcaaaacaggggcattggctggtcctccttttaacttattaatttatgatccaaaaccacttaaggaaaagcaagctataaagtcccactctacagaaaagagggccagcatttcaccacacaggcaacagggatttatctcaaactatgaatccactggctcctttctaaccactgccagaaagaagggccaccgacatacctgctatgctggaaacaacatctttatttccctgaattacaactggccgagttgagaagttaccactttcagtgacttagtgaaattcctcagcatatctcagaagctacagcaggaagtagcactgctacacagtagacctgctgtagctgtcttatagagactcttttggccatgatgggcctgtttcatttgctttggaaattctcaggctaagtcaccccaaccttattatatgaggcagaacaacagcgagagtgccagccactcctctactgcttggacacatctgaagaaacatctcaggagaaactggccactgccttggcctgtcttggatggtggctgcgatcctctctggggtggcaggtgtgttgataggtgccttctttttgtagaaagatgttaacctatgtgatggttaattttatgagtcaacttgactgtaacagagtacccaaattaaacagtatgtctgggtgtgtctgtgagggtgtctggatgagatgagcatttgaatcagtggactcagtaaagtgcatggccctccccagcgtgaatgggcaccatccaatctttggaagaatagaacagaaaagcaggggaagaagagtttgcccctttgcctcctccctgactgcttgagttggaacagtggtcttctcctgaacttggactagaattacaccactgccattcctggatctccagctcgcagatggcagatcatgagacttctcagtttccacagtcacatgagccaattcctgtactaagtcctttccttccatataggaaggacatattatatatggaaggaaaagacttactatggatggaagtgtttacatctataaggaaacacttattaaaaaaactatatatacacaaatatatattaatatatacttacatataaatattttccttaatatatttaataaatttttataatatatattttataaaatatatattttctttaatgagtgctatataaagattatatatttatatatacatatattttaaacataaatatattacatataattatatatttttatatattatatatgttatataacatataataacataatttgttatatgtataacatataattatacataacttaggataacatataattacatataattatgttacatgatatatattataacatactatatattatatatgaaaatatataaaattatacacacacacacacacacacacacacacacacacacacacacacacactgcttctctggagaaccctgactaatacagcctacttccaattacctgattgcacataagcctggatttaactagccacacaggcatttgtcagatggcacgatataaactgtgtacctcccaatattttctgaaatgcagatgagacagacaatatttagggaagtttccttgaaaaaatagttactgaatctattcacttaccagatacgtttcaagtgccccaggatggagacagattggcagagagcaggggactctgccatagcctcttgcccacttcacccctctctcccccttctcctccccagactgctttctcacagccatcatgatgtgaaacaggcctgtgaaactcacttgtgtgccctcagtaagactgtggtggggaacattgttcattgcatcatacagtgttttcttcacagggactcctgggaacaattcctgtctggcttctgtgtgaacaacaggtagaattttcctgagcaattggtttttgtttatctcacagacattgtgaactgtgtatctgacaagtttcctttattccactagtggctacaaagctgcgggctctgtgtgtgacccaccagttagtaacgtgtgcagaaatgcggttttcgcattattaccagctctgtgtattttctccttctatctggtgttgtcccacttttaatttatgatatcttgtcatgttttatgtcccattgaaagccacctggaagacgttttgtgaaataagatttggtttacattgaaaaggagataagatgtggaagagctccatgtcatgtgtttccatctgttttcttcaaatattcagttatgatctctttaacatcctcccactgacaaacccaaggttcagggcatgcaactaagaactgccacaataacgatcataaaataattggaaaacccaaacaaagttgctgaaaatattgtgatggtcctgcctcattctcatgacccagctgaggcaatgccattgaaatcacacagcttcttggcagcctaatacacttgaacactaatcgtaatgaaaagagtaaataactctaccgaatactgaggtgacgtggaggtttcttatgctctcctgtggtctgtaagcaaccctgggaagcagaaagaacaggtatttcacgctgctgtgctgctatttgcactctgcttgctgctaagtggcaaggaagaactgttggtccctagatgggctctttatgcccaaggatttttctaaccacaggaaatggcttaaattcaagaaaagaagtgacaacatgaacttccaagaaagtgtgtggagagacagctaggcaaaggaacacatgaaaatatgttcagtatcatcagtcctctaagaaatgtaaattaaaactataacgtgctcccattacacacctattgaaatgctaaaattaaaaagactgaccatactgagtgctggtgaggatatggagcaactagaactttcatagactgctggtaggaatgtaaaatggtacaaccattttttcaaacagctcgttgttctttaaagttaaacatatatctaccagatgaccctgccattccacttctaattcactttcatacccaagagaaatgaaagaatacgtctctacgaagactcacacatgcaggctcccagcaacttctttgtaatagccagaaactgccaacaacccaacaggtatccatcaacaggtagatggataaacaaatagtagtatatccattctatgaaatatttcttagcaaaagtaagaaatactgttacacacaacaacataagtaatccttagaataattctgtaggaaagaagggtacataccgcatgcttccatttatataaaattctagaacatataagctaatacatactgtcagaaagcagattggcggttgcttgtgacaaacgggagtggggaagtcagaaggaagtgattacacatggggacggaactttggacgccatgcaaatattcaatatcttgattgtggtaatagtttcacatgtaaacatacaaaacttatcaaattatatactttaaacatcacatctcaattatacctcaataaagctagttagaaataattttttgagaaggagtttcaatctggttgcccaggctggagggcagtggtgcgatctcagttcactgcaacctccgcctcctgggttcaagtgattctcctgcctcagcctcccaagtagctgggattacaggcactcgccaccacgcccagctaatttttctatagaaataattattttcatgtcaaatcaccacagccacatgtagttagtggttcctgcactgaacagcatggctccaacttctgtgctgccccaaaaacttgctatttgtgctagtattaatggaagtatgctaatgttataacaagttacgttttagttctatgtgtcgccctctgtcctaacccccactcaaagagatcctttctcatctttcttggaaagtgggatgaacaagcagaaataacaggaaggcaaattcaagcttcaaacacttccctgatggactttactaacggacttatttaaccaaagaatagacagattgctcattttagtgaaaaattcccataaaaagcgactctctaattttacccagaagtaccagtgaatcactggatatccaagaaccttccagttaagattacatgacaaccacgtaccaagaacctaagctattccatttgcctcagccctagtaatctgcaattaaaagacaaagtttgttagagggtagttggaaaaggtcatagttacaaattctagttctggaacttttaggttttggtctgggtttctgcatgtataaaatggttataccaatgcctgactagcagaatcgtagttaagatttaacaagatcatagatgcagggcaccatcagaggaacagaagtactttaaaaatctcccttccctgtacacaccaaaccattcatcatagcacacactttcttcccttatcaagggataagacagcatcgttagcccaagctgccccatttcgtaaactcacaccattttgcaaatgctggttagagcagaaaattccgcaggggtttgggccatgagacacatcccgccagacaagtcccaggcctaaccatctgaccccaggaaactcctcacttaccagcgactgaccacaccacccaccccatctcacaagcccagacctctcccgcctggacctataattaccccagtttgtaagcaagggtgggctccggtgctagctgttgtccccctctgcatgtctttgttcaatacacttgtgttgccatagagctgcttccttccagtccttcttttccctttctcatcctaacgagtctgagcagaggcttctctcatgcttacctggagccaaagcttgtcatgctgagaccacttcccaccagcaatgcactgaaatgtggcattctgccccacattcacctccacgttttggagtcgcagaaaatgaggtgcttttcctaagagagaaaccaaagaacacaagagaatgagattcgacagcctgcaccacttccctattggtggatggcagctcaggatgggcactgggcagggtggaactggcacttaagaagtagcccggctcagtcaagatttcattgatcacttattataagtctggcactgttcgaactttacacgcagaatctcactgaaacctcacagaaatccatgaagtgggcagtatccccatttcacagatcagaaaattaaggctctgagggtttacgtcatcatttggcacagacacatatccagagggggagggaaccaggacgtgaatttagatctgtgctctgtgaaattggcacaaacatgcctagaatacacccaaactgatcattgcttctggggttggcattgcacaaaaggtgaaactacgacactgaaagttaaaagaaaaattggggggcaggaggggtgtattcaccataggtgatgcttccctgtagcctgaagaagcaaaataagaaagctgaagtgaagcacctttgggcctgatacctgcacacttggcctgggtgacgatgttgatgaggaagatgatgaggaagacaaagagcggaagagggaggaaaagggaaggaaagcactagtagctgtcattcttagcgcttgccatttgataagtaccacatgcagtgtctctctgcagtaactcacttaacccaatgcagtcagtagtgttattttctctattacacagtgaatgaactgaggcacagagaactctagaaacgtgcccaatatcacaagaccccagagtcttactctgtgatggtgctttctgagcatgagggggagcgttgattctagggactggacataacagggaaagggtctttcaaatgaaaatcagggtgtgtatgagcagacaatcttcggattaagtctatgttttatattgggtaacctggtttcatctctttccttttttgtggagaagggtcctcacctacctgcactctacaaataataacaacagtaacagctctccattggctgataaattgtatctagaagaattggtttcttcattgaggcacaatgaaggatctctatgccatcaatcaaatcagtgatgaactgggatcacccccagaatggaaacaaatggagggttaggagaggatcaaggaggtttaacaggaggctttggccatctttctacaaggagtcaaatacacagagagacaaatagtaacaataatgtcatttactgagagctcctacaatgccaggtactatgataaatgctttgcatgctctatctaatttaacttcatgacattcctataaagcagacactattatgatttccctgttaggcagaaatcaaggctcagcaagtttaatgtgctgaaagctacacagcgctagtgaaagacagaaacaaaattcaatccaggtccactttagccccaaactcagcatgtaacaagcagctatgctcccttgcctcctgggcactgggaatgaggatggtgtctccagatagactccagggtctgcagaaggggctcccagtcagggctgtgctgatggttcaggtttctgtccatgctcccaaatattttattaaaagtgacccctttccatgctatttttccttgatttgaactattttgtctaccaatctgtgtcagcacctataaagctcagcaaaagccaagaatcttggaacaattaggcagacttgttgggagagcactgggcagcgtggaattggtgcttgagaagtggcctggcacagtgaagagttcattgatcgcttatgatgagtctgacactgtttgtaggactttacacgtcatatctcactgaaacccccaaaaaatccaggaagtgggcagtatccccatttccccaatgtacttttactcaggtttttaaactaatgacagcagctcagagacccctcaggctacctttgagccaccatggctggtgtggtgtcaaggacccaaggcccggggaaaaccacctctatgggcttttcagagttgaaaattcctgcatctagtcaacttgacaaatgccatgctgctctgattgtctgaaattgtttccttttggctctcctgtataattttatgaagttatttttggaactatcagttcaaatcaattcttaaaatgggaatagagtgaaccttggaagcctgttcatgccacaggcttaaagggggagtgaacacatccaccccaggtggggagggagtgcagagtcttagctccaatgctgggaaactctgtgtttagttttacaaagaaatgctcttcccttacccttcgagaaaatggtttaacctctgggatatgcacaattagcaatgaatcttttctggatcaatgtccccagcatgcctctgactcctctccacttcttccttctcagcaacagaccttttgccttgattctttcatcttcaattcctcttcttcccttccttctaggttcagtggtagagagtttagatgtttaatggctcctagtgtgaatattctggggaaatactggcaatttacagcagagataatgaacgcatgcacctacaagagccagttatgtaaattaataaagtcgttcagctgtaaaacaaaacaaaaataccacctccttgccccatcttttactttcccacttttgatagagacttgagaaaaataaagatttctttatataagaaaagcaatgttgtaagcacaataactggtatccaccagtagcctcagcactgaggagacaataaggagtggtgaggactggagggaactggagagagactctgaaaggggacactgaaagggggcagctcctacttaaattcagcagaggaaggccaggcatgcatgctttgtataggggtgtcaaacgtctgatttctccaggccagtaagaaatccagactttatatgaaatctctcactctaaactcaacatgttattaaaacacagtacaggcttaacaaaacatgtgtacatgcaggctctatcaatctgcggtccctgatatgtagctcttatgaaagtcctctgcaacaatttccactagccagtctcacccgatccagccccatacattcagggatgcccccaccactccatgcggtacgcggtgggcatcacatgaaggccaaccccgagtacagttcccagcacaggagctgatctaggctaccctcttcttgctcaagacccttgtctctgctccttggggctctgggtcatccttggctcatgacaggcagtgctctctggtgattgtgcttatgtggggggcctgtatggtcctcttccctgcgttcctggcctctctgaccctcctttttccatgcccccaaacggcctgctcatcagccgcaagctctctcaactgtcaccttcccccagcatctgctgctctgggagagaacttatattccacgagcttcaaatcactcatcttcagccaaacatggttgaccttggtacccaggtcagccatcggctcgtggttctaagcatttcctactcactccacactgagacccaattccccccagatgggatgccactgaatgggcttaacagaagactggctgtgcatttggggcaaaaatgccttgacgttagtgacatttagacgcctacagatgtcagtgcagcatctgaagacatattattgtgccctttatcttgctctttaaacctgacagtgctcagtaggaagccacacaattgtggagaaagcccagtacgcacattagaaacatgttgcagatgctctgtgggctcggggacacggccccacaagattgtgagggagaaagaaaagtcaacttagaagctagaaactttgaaacggagtggaaaaatcatactgacatttatcttacacagttataactgccttggccctgctaatggctaacactgagaaacagcaacagagggtaactaaggatagaatacttttagaataacacaaaaatgttaaatgggctataaaatatagatgagaggcttccgtttgtaagagaaaataatttctttgagtattatgcctgtcttttggttactgttttgggagcttggaggcaattatctacagttctaatttcagtgccaatcaattgaagatacaattgcaaatcagtcactcgctccctggaacttttggaatacttagtggaatcacttattgataaactctgaccatatgttaatagaaaatatgttttagaggacagaaagggataattaaaaagactttatgtccacaggcttttttgaattgaacgcatatatttcaatatagttcaatttttaaccatctatgagtgaagtcataaattctaagactggaggctggggaaaagcacctttagtctaaaggagagttcagaagctactatccacttgcatgacaggtaatccctgtaagcagtccctggggcccacagggcccctcaccaggcagcctgctcagttcttcccaggctctcaccaccttgcttaagctacaaatctgtgagtgcactatctccgatgcctgactcttaatccaatttatcaaatgagaccagttggctctgcctcctaaatggatcgctaatctctgcacctctatccacctctatgctctaagtttcttcattgtcctgctcataatttgtcatggtctgaactgtgtctcccccagatttatcttttgatatatgaccccaacccccagtatctcaaatgttcctatttttagcagcagggcctttaaagacatgattaaattaaaatgaggcctttagggaaagccctaatccaatccaatctgaccagtattctcaacagaggaggacatttgaatgcaccgggagacaccaaaggattgtaagtacagaggaatgaccatgtgaagcctcagcaagaaggcagccacctgcaagcaaagaaagagcctcaggagaaactacggtggccaacaccttgaccttgaactgccagcctccagaactgtgagaaaataaaatacatttaagttgcttaagccatccagtctgaggggttttgttatagcagctttagcaaactaacgcactgtctgtgcatataattatataatcatatcatataattatataagcatatcatataattatatatgatatgcttatataattataaatgtatatatgatatataaatgtaaattatatgattatataattatttatatactataactcacatttatataatatatacttctatataatgcttgtacaattatataatatatagattataataatataatcatataattactttatttgttttgcttcagcctccttcacttcaatagaagtccatgaagacagacagtcaatctgtctttctcactcccacaaacccagaatggtgcctgacatggagctcacgctcagtaaatacttgttggatgatgaatggatgtctctcagtcaccctggtgcgggccaccaccacctcttgcatggctccagaactttcttcctcctaggtctcccgacatcttctctatggtcctccaacacagagcagcccaagtgacccttctccagcagcactccctgcagcagagcctccctgcccttagacaaacatttaaactactcacgatgctgcccaaagtccaggctttcctgcccaacatttgccctgaccaccttctcctgtgccctgtatgctcaggacatgctggcagcatcaagccaactccgtgtgcagggcctctgcaaccactatctcctctgtctgaagcacccctccaccaaatcactagactgtgaactccctcctgtgatttgagtcccagcccaggtcacattttcaaagatatctcctctgaccactatatccaagcagccctcccgtatcccagacaccgacacttactatatccactattattttcactatctgaaatttctggttacttaatattagttactgatttagtgcctttctttccactggctcttctgctaatcaaacaccatgagtacaaggaccgaacctttcttagtcacttaagtatcactgtgcctaggaaagttcttaacacatagctgatgtacaataatttacttgctgaaagaaagaataaaaacctgggctaggtatggactgagcactggtccttaggaaagggactttgctaggccctactcaactccacatgattcgtgagctgtggatatacctcaggcattatatacattgccagtatttgtccatatagttaagtgaaattttttccaattccagccactcctatggggtcttcacatcatgctttctgggaagtttatgcttaagctgcctcaacactgaggttgaacccaacaggagcacattatgcagacataaagccaggatcacgccttcctgagttatatcccatggtccatttgctgggtaactggctttcagcaatttcatgaccatgccacccacacccctctgcaggaggaggatgaggttgtcaggagaatcctgacttcaggagcaaccccagtgaaacgagaatttcaaaaggattcatgagactttggggggtggaaagtcattccagtgccctccaaagagccctctcccatggagatttatcaaagaaaaaggatgcatttgcttgtgacagcaaaccatggtcagtgcttggaggtaaggcagagcttttaccactctggccttgaaggtagttacggctagggtaagagacaggtgtcaaggttgggcatcaggacggagatgaaaattcccattagagcacaaagttctgggatccaggtagagagactcatgctattttcccttgggaaaagccagctgtcacctactagaaagctaaagtccaagcatccagcacaaagtaagaagcaggaacacaggtagatgtggcagaggcaagcacgctctgagtggatgggatgtaggcagggaatgaggaagacagaaggcatgtttcagagagactacctcgaaactggaggtagtgcaagattgagcgcatgcaattaaatggaccacaggtagcacagacatctcccaacacagttgcccagtcttaggctcattctcaaatgagcagctgatggtgactcccacgagtccagggtggggaatatttcaccctagtgaaggagattcatatgcatatctactacataaaccctgcatagctggggggatttctgggatcctcttcacatgaagtctgggtcaatagaaacatttccccaggcatgactgaatgacagacccatctgagaaattctaaaagcctcaggaagtaacccagagggtagggactttcagccagtgcaaagaagagcccagtagcatctcagcattcccaagataccagttgcttcttgggaaagagggtctctcctgcacaggatccaaacacaatttctcaaaataatgttcggaacttgtaatgtgttccaaattcctccagagaaggggctctaagacaatgagtcagacaacggcattctagtgccaggcagagggagggaagttacatttgagggtctgacaaattcattgcagcagaagtggaaagagttatttcaattaaagcaacatggatgaggctgaaatgagaatagtccctaaatgcgaggattgagaagcacataaggagaggaggacccatgatgtctcttgaggcagcagcaaactgcaccatagcccaaagcatgactcatgcccatatgggaggagtggagagagcccacagggggttacctagaactggatggctgccaagaaactactgggaatctccaatctgcagaacactaacaaactcatggggctggcattccaggtatccctcccagggtctgccataatctccatgcaaatcagtttgatttcagtccccccaaccaaatgtcactgggtatgatgtcatctcaactacctgtacccaggacttatggcctctgagatttagtaaatccagaaaccacatctccctgctgaaacacattccaatatctgagactaaatatggcaaagaagtagatgggtatggaggagtgccacgcctttgaggactcttgacgctgtaccataagtactaaccactatgagaaatctctatgcctacatggagctgatgagtatatttaaaattattttaaaagaattaataacttcagggtacttttccctgtgagggaacagtgtgctaatttgctcagtgttttggtggtggtgtgtttttttttttttaagacaattgcacaagattctatccaaagccctctaattctaccacttcagtggtctgaatcccactaataaacaatcaggactttagactcccttaataatggagagagattcaaacaaagatgttttgccactctctgcaaattcctggaggtgctgcctgttgaacaggccggcaaaattatggatttattcaggactgattgcattgagtatgtaagcatttctgaaggattcaaagagaaagagagagtgagagatgtttgtaagctgaatgaatggaagggattgcaggctctatgctacccagtctggcatggatcaaggctgtgttgggaggaagggaaagacttactgcatggatgagcaaggacccggacctcgtccacggcgatgtagccaggatgacccttcaatgagacggattcaaatatcacctgcaacacacagggcgggagtcaatttcacagaaacagttgcaggcattcatcacaagaagctgcccggcccccagccctttatgtttcaacttcccatcagaagcaacccaagaaaccttctgttaagacagcacgctaccctggcaattgactgggattttcaacacaaggtaaaaaggccacactttggtggctagcaaaagaagaatatttttaacaaatttcagaaataacacttagatgcaggaaaaacaacccaaacaccgaggtctcggaaaccccagtctgcatctttctcattgcagcttcaagggtcaagccacaacttgaccattcttctacagagaactactttctaatattccaactttcttatgaaggataagatagatgcctaccttggaagctaccataagccaaggagggtttaccatgagttgattctacattgccaaggaacatattacatttgaatctataataacactcttaaaaataagtggcaatctacctgttggtatccaggagtagaaggcaactgacttccacctaaactgctatttccataaaaattttgtaatgcatttagcttccctcatcactcaacctctatcttcaccaaggagatatgaatgtctgtgtggatagcatggccaacatccttgaactctctggttccaatggccttcttcaatccactttagccccactttcacctcatttttcaccttctggaaattggaaattccattttcccatactccggcacagtctctaccgacagtctcatcccagttgactcctcttgacctgctcctcaggctcacgtggtagcctggacctctgcttttcttatctaatccttggattattaatgcagaaggtccaggctaccatgtgagctcctcagactccatacgagtctctcctaaagcccccattcctttgcacctttatttcaactttgcccagcctataacacatttgccttctccaatcctgtaccttacacaactgccgccctttcaacatgcacccatgtaatcccagcagacacccacatcttcaagaggcaagagggaaagaggggctgacttctaactttttacccactgacttgatatccatccacaccatcccctgcctcttctttgcaaggaacatcagcgctcttgacccggactcttgctatattttccatcttttggattctttttggttttctctgtctaccctatatctccaaaccctcccttttatccctaattttgacatgtcaacagcttctcctattctttaaaaactacccttcagcagcaggttttctctaataccatccagttgtgtttcagtaacacttaaaattctcagcagttttatcttcattgactcccaacacttcctgactttccactgcaaaactttaacctaatatgatctggaacttcccctaaaactgcttacacggaagatactaataatcttctaattgcttaatcaagtagatattttcaatctttatcttactttaagaaggaagatagtacagtgcttaaactcttgttccaagtgcctaggttcaagtcctggctgtgccacttgctagttagtagtcctggaaaagttatgttactgctctgtgcctcattttctgcatctttaattatagtgtctacctcattgagtgattttttagattaagggagttaagaccccacttagaacaatgtatggcacatggtacattctcaagaaatatttactagaattattatcacaacttgaccattcttctacaactgtcagtgttcatagactctccatttctgggtcttttttctatttaggctcagataacactttattcttgttatttttctcataaatctggcactgttcaatgcctgggaggtctgtaggcattcctccttctccatcttcccttctaacgtgggcccctgttagtcatcttttcactgcatacactctcccttcaacagctgccaatgcactgataactccaaagcccagctctgcaccctagacctttcacccacacatccgtcttaggtgtccaggtcacagatctgtatttctacctaggtaccacatcaatgacgtgaatccaacagatctgcacagattcctcctcaaaccttttccctcattgaccaatagtctattctttctgaaatacggaatatggttaagtggcactatgacccattcagtcacccaagctggagaccagggtgtctattgggcctcaacttctgcctcagccctcatcttcattttcctttttattctaccttattagcatttctcaaatcttcccatgtcatacatctctgaattgtatgctataagataaacacctaaaacagaatgactgcacaacattaaaaagaacaagttgaagaaagacataataaagaaatgcaaataaacagaaagcagttgttgcaaaaatagtgtgaaaaccttgaagtagaattttaactgaaaagaacaatgaaaaaattaggtggactaaaatggtcatttagaaaaaacacatgagtcaagggacttaagtgaagaaaatgatgaaaaagacatgggttgaagactttaatctatgtcttagactttgactactaatcgtataggaaaaagcaagtatatataatgtaaataataatgtatttcctagatacatgttaataaatgtaaagacagaatgaaacttccattcaaaggcttatggctcagttgcaaaaaaatcatatactaggctacaatataacttcaataaatccctcgaagaagaaattgtttagctttgggcctatacattttctaaccaaattcactacaactagaaattagtgacaatgtcttaaaaaccaatttatttaaagttacacaatgctttcttaataactatggtgtcaagtgtgctttgtatgttagcaaaaatctaaaacaaaattaaaagtcaaatgacaggttgagaataatatttgtaatacctatgtcagctaatatgaaaatatccttttttatgtgtaaaggactcttgagaatcaacaaaaaaaaaaacccaaatcattcaaattaaaaagtggcaaatgacttcaacaggtaattcacaaaaagaggaagtaaaaatggtaataatctatgaatgtaattgtgtaaaatgacactgagtatgatcaaaaggtgccccagaagacacctacaaccttggagggagatgatcactccatcaatatgcttctgacgtgagactcctagccataggaagccccacccaatagatagccagctccagtttttagggacagacaccacaaggggacaaggtgatgcctggaccctcagagatggaaagacctgccaaggtgttctgaggagagggagaatggttatctctgacccaagcacactctcaagaaaattcaaccacggcccttgaggaatcaaagtcaggaaatgggagagccaggggagtgagtagagaagtctagaggtgactctggtgcagtgttttcctcctgtcttcaggaggcaggggagtagggatgggatgtcttcaggaggcaggccatgcatacccagtggcactccaagtcagtaaatggaggccgagaccctgagtacagggagtggagcagagggcccaggctgagaattccaacgtctctgtagatgctcttcagctccaaggctgccatgtggacctaccatctattgcacatgctccagcccataggcttcattagagacctcctggtgcgggtgttgaagagatgaggcttgcatggaaaggtgaaaacctctccctgtgcatgactacttgtgcaaagccaggaagcaattccccacaagaggctctgagatgagtcttgctcatccttccaaaaaatggtttttgttcatacttggaggagggtgtggatatgtcaggccatggtttaacagacctggtgttttaacctaatcttttatagttcttgagcagaaaatctgcatggcaaaaatttcaaggggctgcaaacattttcaggagaagagaaaaatgttggcacatcagaactcctcttagaacataaatatacatgttttcatggggagagattgtttagggtaaaattaagagagactttttttaccctatcagcccaaggagacctgtataagacaaggaggaggatttgatgcttagtggagagaagtgggatgggtaaggaagcagatggaatagaattccaagagtggtagagtgggcccctcattgtgataaactccacttcattgtgagtgaatttactaaatctacagagtgccacatagcaccgttttccagggaaagggactgagtttaaagtccagttgaaccaaagctgggtgagtccttaatttcaggggcctatatagcgataataactaccaaataaaagataatttttcctaggcaggtgatggagactagggcaagcagatggctgcaaaattaacagaagttcttttatttttttaaatcttgaaacagaaaattcagaatcattagaaaatatgaaatcaaattaacatcacctagaaaggagctgtgatctgaagtacacgtgacttaacagtcattcagcactgagtggtgaccacatttaataataatatattgtgcatttcaaaattgctgaaagaatagatttttttaatgttctcactatacaaaaaaagttaagttggtgaggtgatggatatgttcattagtttgactaagtctttctataacacatgcatagatcaaaatatcacactacaccctctaaatacacacaattaatatttgtcaattaaaagtaaataaacaaacaagcccctgctttcccaagaaaaggcacatgtcgggagatggctggcagaggcaggttctcacccccggccttgccaaaagtctggtgccagaaagctcactaatgagaaagaggaaatttcagtgtttattacagagctaaaagtcaattttagaactataaaatacgactttaataaattaatacataaaccatcagctccgaagcccagtaatttgtatttagcccatagaatcatatgtacaggaccagagctccaggtctggtgaattttaaaacccattttgctagtgtcattggattttctgataggcctccttttcttgccactgtacttatgtgtatatgtgcaagtatgttttgaatctgagagtcttgtgggtgcttgtccctatgtgggcactctgcagtgtttgtggccaagtgagtaaccattagtgacggtgtgtgtataacatctctctccaaactgctgctctcagccaaggaaatgcaatgaggctgtagtagccaataaggtgcaaatcagaaaattctcccagatgaggctacttatccaagggagggcatggaggttactgagtacaggcttaacaacactggctatttcttttaaaaaggcttccttcctccttcccctttgtctctttttccctcttttcctttttccctccctcccttcctcccttccttccactgaggcccactacaagcctgatggcatggtttggctctgtgtccccacccaaatcacatcttgaattgtaatccccataatccctacatgttgagagacgaacgtggtgggaggtgattggatcatgggggtggttttccccatactgttcttgtgatactgaatgagttatcacaagatctgatggttttataagtgtttgacagttcctccttcacaggctctctcttgccttccaccatgtaagatgtgcctgcttccctttctgccatgattgtaagtttcctgaggcctccccagccatgtggaagtgtgagtcaattaaacctcttttctttataaattacccagtcttgggaagttctttatagcagtatgagaacagactaatatacctgacatgatgatacatatatgttctctaatttcatctgcagaaggtcctatcatacctaatatcctctccattctacagatgagggaactgtgattctgaatgatgacaggatacagctaacattacacaactaggaagaagattctcagaaagtgcaagctattttccctaaaggcaaagcagagcttagagccagaggacctgggatggatcatggggacttgaatttaccagtagtgcttcctacgctggaagataggacatgttgccacctaatagagggagctactgcacagatctcatgcctctcatagggtgtgaacatagggggtactccagaaatgtcctttccccccatgcctcatccaaaagcatggcaaatggtatgactgtccctgtactcagtcaattttcttgttcattgtacttcaacctgtggccccatcctgtacccatttgtgtctggtcctatatatggggtttctaattgaaaccttaaaggctcactgaccgtgcccatgagcttttagagatactttatgtctacagtcaatgatacagtggtgacagtctagggagtagggtatctgggatctgctctcagctttgccaataatttgttacgtgttcttggacttcactatgcaactctggacatcatcagctttatcatgtacatcagggttcagctatggcctggaagccaaatccagcccaccacctgtttttgcacataaagttttgttggaacacagctgggtccattcatttacatattatctatgactgctttcatggtacaatggcagaattgagtaattgcaatagaaattgtatggcttgtaaagacaaaaatgttttctttctgcccttaacagaaaatgtttgccttatctacaaaatgaggataaacctaagccacatgtgccagtatgcattctgtaaatgtctatggataggaagactatataatttatcactgaaactggggcacactatgaaatggatgctcttaatttcaccaggataatgggagtaaaccagggttgtcccagcaaactgagatgtagggccacctgtctgcagaatactatctctatagtcaggtggtcatccaacaaaaagagggccaagatcaaacttagaggcaagacaggaggttaaacaccaataaatggatttctttctgactcctcagaactcccacgtgggtaactgtgagtctcctagaaccgaatacatcacacagctttttcaaaatgctgtgacctccaccacatcagccttcactacagagaatctcggggaacacatgttccacagagcacactctacaaatcatacactgggtattcttcccagaatgtacaagcaagatctgatccccttgttcacgcaactgtgcaggtagagaatataaggctatatgcttaatgcaattctgaaaccccaaaagctctgaaaacaacgttcttcaccttagtattataaaaagtaatttggtggtaaaacctgaacacagccgaatggcctgatactacttacagtctttatttatcccatttcttgtgagtgtgtgtaagttttgctgtagaaatattacatttgattacagggtactgcctcagagcctaccagggttgttataaaatacagaagatatgccaatatattactaatatattactaaattccaaacattgtgaattctgacacatatctgacaccatcagtttcagataaaggtttgtactaaaacatattacacaaaaggaaaagacaccgaagtaaagaggccaaagatatataatttgtctcaaaacatctaggatacaacacgtcacgttgttagtgacacgtgttaaaaacaaaggactctgcttttagccactttcattcataggttcctgctgttgtaaagaagggaacaggggcttaacctcacaccaaatgacaacagtccaccctgaccaccccaaggccagctctgtcccactcacctctgcgttaccaatgcctgaactggcctggctcacgcaggatgcaaaatgactgacaagcagatgagaatagggagcgagtggctgaatgatggtgtgatgagttcttccaagaatttactctctctttttctcttttcttctctttctcacttcctcttttatttctgctctcttcctaactttccttacttcctgcctctggctcttggtcacccatgggcaggccaaggagatgaggctgggggaaaagcaaaggaaacgtggtcccaaacaaggctacttaggtccatctcccaggctgcttgcagatctccaggattgcgggagtcacctgtgctgttcgacagtcattgccattatatctcattatttactcctttaagtctcctgacaaagaaccccaaaataaaaaccttaagaaaaccctcaacacagaccaaggcattacaagagatagctgcgggattctccagcaatggaggatgagaatgagcagaaccagcacctcataaaggccaggtcccttctgagagcccagccttggagttaccccgcttcatctccccatccacaagttccaggcgtggctaagcctttcaagaactctactaggggaaattgtggagccaagtggttaagaattatgatctgtactaatttgacaaccacgagctactgaagcgtggctaatgagactaggaaactgaacttctcattttacttaacttcagttaccttacattttaatttaaaaactgatacccaattcacttaagaatgtttggaacaacttgtgtatatgtatccacttcttcagctatacattttatgagtccaaatacagatcattattactaatgaaaataaaacatttaaattgagacttactgtaagtgtaaaatatagactgaattataaagattgacagggagagaacagaaaacatctcactaataattgtttagattgattacatgtccaagtgatagtattttggatacgttggtttaagtaaaatgtattactaaaattaatttcactgatttccttttactttttaatgtggctactaaacgtttataaatgacatgtgtggttcccattatatttatactggattatactagcttagacagtgaaatcaaacaaaacgggtaaaaaacaaggcactacctccgttcaagcttgggttatcacttaccatttctgagccttcgtttcatcacctataaaatgggtacgtagtacctgcctcaaaggattgttgtgaagattaaacaaggtaatgtatgtgaaacattttgtactgtgcctggaacatgataaacacccaatgaacggtaggtatcaccatcaccaccattaccatcatcatcactacctctcccctatttctgaaaggagtttcaggaaatgcatcatgaagaaaaataacattattctaaaaggaaatcacaagccattgaggataaaattgaaatatgtatggcaaaaatccagtctaaatattgagggtaattgagtattaaattctgatttctcgttaccaaggcaaaagggaaataaagcttgaattgcctcattaaggtaaacccaacaagcaatctcaatagatacatgtattcctaacactaaaatctggaagaactgtaccatggatattaacttggagaatgtctaagaagcccccagccaccggttcatcttctgcttcagatgctagagaaatttctccaaaatgcagatctgactgcctcaccctctaacctaaaacctttcaacagtgcaagtggagattaactgcaaatgagcacagtgtatcttactaggatgatgaacatgttctggactgctttataatgatggttgcacaattcaataggttttcttaagtcatgggattgcacacttaaaataggtggattctgtgatatgtacattttaccttaataacattgttaaaaaaaaaaaaaacaaaactttcaatggccccaggccaagacaatgtggagaaatgttcctctaagcatgctttatggattggtgccaatctgtgcgctgtgtgcatcagttcgcaaggagataaggaaggaaagagagagaggtttaggaactgttgcaacaatctgtcattgccatgattttttttttttaccatggtttataagagtattgctccacaatgagttgagaggaagtgtcccttcaccatggacagtatgagcagcactgctttaaactaagttccatccattagcctgacattcaaagccccccatgatctgcttgtccctgcaggctgatctccctgtctgtcctctttgcaatgtaccttaaacaacttagactttccaaactctgccatagtctatcatccacccctgcagctcactgtacacactgtctgtgacaactcaaatgcctttccctccctcccttttaaaataaatttgtattcattcttcaagattcatcttagatgtcatctcctcttacaaaccatcctaattgccttccccagcaaacaccccattccccagagggtgatcttttacgagttatttcatctctccgaacctcaatcttttcatccataaaataggctagtactagtacctccctcatcatgtcataagcactgactttataaaaaggaatcaatgcctatgttcctctagcatcttcaggagccacatgcatcctggtacattgttattttatctacatatcagtcttttcctacaaatgatgaattcaagtgggacagcggctgtgttaggtcacctctgcagagcttggctaggaggagaagcacagtaaacacgagtgaataaatgaagtcctttctagacctagcacctgtagggagagcaaaggtgtatagatttattacaaattttcaaaaataaaaccatggtaaaatgccatacctgatagaaatgtggccagaaagtgctgatggcgagctctgccttcacccagccctcagtgacgaccccggacacattccacacagggttcccttgggggccaccattcaccttcacgtagacgttcaaggcccctgggctggacctgtcacggctggagaagtagtaatggaagtcgatgcagtgggtgtcattctccttcagggttggcaggagaaggtgggccttctggccagaggctctcccagagctgttcaccatcatgaaagatcctggagacccacaaagcaggtgggaagtagagacaaagagaaagtaagaaaatccttctgaaaatcagtcacacccataaacatggtggccagaggagtggccagagatcaagtcactctagaagggtctgggtgaccctgcaaaagccacatctctctgagcctgagtatcctcttctgtaattgggtataaaaaatctattcaataaggtggttttaagaattaagagatggtaacatgtatgaagtatttctacaacgtgctactattgctatttgcagaaaacatagctactattactgtttgcagaaaacatctccaagcattcaaaaagtttccttgtaggacgaagtgagcctcttttgagttgctttgacaaattaaatggttgtttccaattctttatccctccctggatccatgtcccttgccactggctttgcagttccttccagcagaaacagagggtatgtccccatcccttgactttgggctccaccatatgacttgttttggtcaataggatgctaacagaatgattcaagcaaaggttaaaatgtgcttgccttgctgggcttgccgtcttgcactactgctacctttcatgaaaaggatgtgcccccagtagctgctgcccctttcagcttgggatcaagaatacacacatggaggacacctgacttgaactgatcttaaagaaccaagccatgccacccctgcagctggaatcacagccacatggcccaaaagcccaacctagatcagccaatctacaatcaatgcacagttccatgagagctagaataaacgcttattgttgtttgccagtgagtttcttttcagtgtgtcatgcagctttattgtgacaatagcttattgataaagctgcctgggagggcagactcatgaaagaaaccatgagggggtaaatttcagttcagtgtacaaataactttctaacaagtaaagttggtgcaaaatagaatggactggccagagacaaagtgagtccccaccaaagcaggtggcaaaacagagcctagacaaattaaagagatgattaaggaaatttcacaagcaactgggagggctgaacttagagtcttatgattctatgaaataaactgcatcatggaacactgcagataaactcagttgattctagaaggacagtttccacctagaaaaccactaaaatcttcaattcaaaaataaaccttaagaccacttatcctcagccaagttgagctacttcaatagctaaaagtcacctcattctttcaccctaataccaaaaagactaacagctcccagttaataagtgctgggaaacccataacttcttgggattctagaaggtaccaatcaaaccctgtctccttcaggttctgagtgaatttaaaaacagacatgagagagatagaaagggagagacagagagagaggagttcaaaacctccacgttattattcacaaagtaacttggacttacggccaaattagactttctgcatgtttcccctgaaccaccatgcagagcaggcggatggccatggacccaccctccaactgtgcccagatccctagggccacagttgtcttactgggatgaccacttaggatagttgggtgggtttgtaccaaaaggtagccaggtgaaaagcacagagaaacctgaaccagtggctatcaggttttcgccatcctaccaatgagaaaaacttgtgtgtaaatataagggatacaagtgcagctgtgtttcatggatatgttgcatagtggcagagtccgggcttttagtttgactagcaaccaaatgatgtatattgtatccattaagtaatttctcatctctcacccccatcccaccctccaactcttccaagcctccagtgaatatcatttcacactctgcgtccatgtgtacgcattatttagctaccacttataagtgagaacatgccgtattgattttctgttttggagttacttcacttaagattattgtctctagttccatccatattgccgcaaaagtcatgatttcggaaaatgtagcacctcctggggaaggagccactggaagtggaacaaaggtgcgggtgtctttgcctggtgtttctgagtaaggcgtcccagttttatggccgtgcagtaacacaaggtaagtggagcaatgtctctatgtcagagaagttattgaattatcataaactcgcaagggggcagctaaaaaggagcaattataggggcagaaattgaggcttagagatgagaccgagcctgcatccatgcccatatctgtccactggcctacatgccacagggttccaaaaggtttccttggacaggtaagtagcaactcacaagccccacaaagggtttgtgactgcctctgccactgaggagtagcacatctcccagcagaggcagcagcctgagaagcaaagtgtctctctcctctctgaatcccatgatacccgcatgcacatttcagctcctgtcctcctgccaattcacgccacgggctcatgtacccttggctccttacaatccactgtagagagagttgggaaggttttccttccaccagttcatgatcccacttctttccatcctagcttcggtagcagggcaggctcgctgaggaggtagagattgccctgttccatgtagcttcatgcacaaccctgtaacattgttctgggcacacagctagactatgtcttccagcctccctttagcatttggtagggacatgcaactgagttctagataatggggcatgagtatgatgtgtgccactttccaggcctggttggtaaaagctgcctccctctcacccccacacctccatactaaatgatcttgcctctcaaagactggtccttggaccagccaccccagcatcacctgggagcttgtgagaaacaagaatctcacatccacccccaggcctattgagtttggatctgcagtttatcaggatccccaggtgatcggcatgtacataaagcagtgagaatcattggcccattctattttcccatctaccagctgaatgtcccagagctcaagagcctaggagagggcagtgcaccataaaagaagccaggttccctgaatgagcacaaccacacagaaggctactcacctattaggagcactcatcttggattttaagtaaaaagggaataaactattattcagctacaagtccctttatttaaggcaataagatgtgaaacagtagctactaagcaaagttgcaagacaggctacctaaggatatcattaagagcagcaagccttggtggtaacttgggaggcatttgaaatagaatagcctaggcaaaggcacagaagcatccagcaatgctagtgtaaggtcttgggggtggggggtgggatccagcggccatctctagccccttccacatgtagcccaccttatataggtctgaccacaccctccagaaaggaagggagcctatctgcgagttgagctcaagcgcgccactagagattgctcaggagtgaaaacccttgtatatcatcagctctgtggggcccgctttgatcaacaggttggcataattaatatcatcccagggctgtcagtttcctggagatcaaaaatgagccggtcattacgccaagatcagtcagaaacaagaaagagaaagactgtaaatacattcttttcccttctcccttaaaaaaaaaaaatctactaacgtgataaggaacataaaacagcattagtttcctcatagttattatacatagcactgaaaattgtggaattaaaccaggaagtactctctggctggccataaattttgcatttttccccttcgtgcataataatgccttgataagcgcctcgttattgatgtgtctgcaacacagatctcctttttggaggcaaaatgcttctccatagcagatggtggctattgtgtttacacatgagcacctcaggattgcatttcctcacgtcggcagtaaaaagaaagtcctaattgagtttttaatggctttgcacattgttcattaagattacatgagtgtgctcgggcgactggcagctgagggccttgggcaccaagagctcagcatggtccctgcagacaggtggccccgccagctcccagtgccagcacctacttgaagggaatggatgctggtggggcctcaaatgctgccaaaagccaagcagctgtggtgacatgaaacaagttctggatcttcagttaagtaagctgggtttcactccagcttctggcatttcttagttgtgtgactttgagcaagtcagtaaaattccctgggcctcaatgccctcatctataaaatgggataatgaaacctacagatcaaagttgtttgttttcagtgaatattaagtaaaaacggtacttaataaatgctaattttataacagatagccaacagcaggtaacagtgagcccaatgccgtttataaaaccttatgtttattgagaacttattatgtgccaggcattgatctaagcattgtttagcaccctaatgaggtggtgccatgcaatctctgttttaaagcaaggaatacgaaggaacagagaggtaaagtcattttcttaaagccacatagccagaaagtgataaatactcaaaccaattattccttcttagaaagcagagactacagggtctaggaatgcactttcctaaccagtagctaataacgccatatgcctatttaaaataattaaaattaagtagaaaaaaatcatttacttagagatactagccacatttcaagtgcccagtagacatacatgactggtggataccatattgaacagtgctggtgtagaatacatccattgtcacagaaatttctgttggatagcactggtcttgaagttgtggattacttaccaaagcataacaaattacatccaagtgagtcacaggaacttaactaacccaacctactcattttataaactccagtagggaacaagtaacttggccaaggtcaaccaacacaatgaagatttagactcagattttccgactccgatttcagtttctaccgcagacaactctgccgttccttgcccgagctgtacagccacagaagtggtttcccagatagctatttaagagggaaaagagcatatgttgccttcaggaagcagaagcatagaagtcctaggcattctacatgtcacatgacttaggagaagtatgtgcacacacgttgggcattcccagcctcagctttgacaggcagttcaacaactgtttgttgaggcccaagccctggtgagcaaggacaatgtaggatgcttctaacaaggggtccctgggataaactggaacccaagatacatctcttctctctgatgatcttaaacaagtcacttaactctttgactctcaagtaccatcttctataaaatggttataaaacacatctcatattgtggcctcatgtaatccatgaggattaatacaactactatttataaagtgcgtagataagtatcgctgcatgtaggtcctcaaaaacagcttcttttctatctttcccatacccctaaagttttgtttcagtgtagcagggagaccttaatagactgaagaagaaaatagtaagaaatccactgagaggcagagtaaaatctgctgccccgtctccacctcccacaattgataaggcatcaaggtccagggatgcctcctccttttgtttctctgaccatcttcttcctttccactcccttggcactggcctaattcaggtccatggcatttgtgtcagaaactgtttattttgcaacgacttcctaagcagtctagtccttgattctctcaccatccaataaaacagtactcagcaccatctttctgagatacaaagccaaccgtgacatgttctcgacttccattgaggtcttcctttataggaaattccccacttcctataaagcccaaggtctttcatgagaatatgtggagccttacacatcctgacccccacccctcctgcctcttatatgaagactatctctcccaccctcccccgcaaacacagtcctcggccactttgtggtagacagaataagggcctcccaaagatgtccatatcctaatatttgaaacctgtaatatgttacctttcatggcaagagaattaaggttcagatggaattaaggttattaaccagataagcttgagatggggagattattctggattttccagctgagcacaatgtaatcacaagggtcctttaggtagacaagggggccaggagagtcagaatcacagttgaggagctatctgaggaggctatgctgcttactttgagatgaaagaaggagccatgaaccaaaaactgcaggtggccagaaaaaaactagaaaaggtgagaaaacaaactctaccctagagcctccagaaaagaatgcagccctgataccttgaatgtaccccagtgtgacccacttaggacttctgatgtccagattagaatgtgtggggtttcggccactaaatttgtggtaatttgttacagcagcaataggaaactaatacacacttcaaacatcctacgcatgtccctgctgctaggcttttgcccaggtgatacccttcctgaaatccacgccacccagctcagccatggtccttcattaaactacttaaatatcactttccctacatggctttcactaatgtccaggaaacaggcacttctgaattgttgttcctatacttcagagtgcatacttccattataggtattttaaacaggatctaatttaaaagtccataatgatgaaatttagctatctagtcataataaaagtgaaagtggcacaaagacatcaaaaggcacaatgcactttcaagtaagaaaatgtaggtgcaagagaagcagatagtgctaccagtattaccatgaaaactagtaatcatcaagccaattgcaaacataacaatagaccaatagccataccaataaacatatcattcaacattattcttattatctatgaaagcaatctaattatcaagtgtcaaaaaaaagaaatctgctgcttttctaatataccagaaaatggggaggtggtgttaattggaacttaatggatatataatacctatttaaaacaaaaaaaagatacatcctgaaacttcaaaggaattgaatattgtgaacattttgtcactttgcgtgaacaagtaataagcatttctgtaaccattcattcagaccggtaagttggggtttcagcatttcatatgcaaatttgttaaggcaatttttgaagaaacaactatctaataatccatgtagctgtggataatgtcgtttaaatatggtattaacccccagtgattggatttgaaggcgcactggtggagaggctctgctaaccggtgctggataccctaatgcaagcagagtcaggcagggagtttgtgtgcacgtgggtcttttcctcaaagaccaaatccctagccgcctgcattcttttacactttctgagaaaaaaaggaaggcagagaggaagagggagagacacaagacaaagaaggaatggagaaggggaagaagaaagaaaagaaggagaaaacaaaagagtaatgaaaactaagatgaagaaaggagggaaaaggggaagaggatggatggaagggaagaagggaggaaggggaacaagggaaagaggcagaaggagaagcaggagacatgaactgcaggcgagggaaggggtactgagcagggggagagaagaggcaaaagattatggagacaaagcagaataacatgtaaactacacgcaacccctacataagcttgcatccctcctgacctcccaaacaaaagcaaaagtgaaaataaagactttttacccagcatacttcttctggtccttccaatgatgatgtgatgaaaacagaccccgggacaatgttgcagggcatactgggacctgcgtctccctttattacttcataacttgccttccccaacaattcaattcaatctcccaggagcaaaactaaatgttattgtaggaaaaacaatggaacccaaaacacaacagaatgacaactcagcaacataaactgtaaaacataaggtcttgaccgatttgctctttgatgttggaaatagacaattcatttggcaaagtccagatgaaactgaaggtcagataatgctactctcccttcagactcttcacctcttcctatgcacccattttaaccacacactgccccgtaagcaagaattctgtctgtttcttcacgtgcaaaacaggtatatatacaggtagaggttttaaagttccttccagctacagaagtctgtttccaagactttacagcgactttacctgactagttagtggtaagtcaggagcccaggctggcttggattttctacctagactctctctgaagaaggggtgggaaggaaagatctttctccttgggtcttgttcccaaagaaatgcagtactttttgtgttctcatgagaatttatttatcttctcagtcactcctcttcttaacaataacaacagccaacacataccatcatgttttacttaagattcatttgtttaattcttatatcaaccctatgaggtagtgactactatcattcttcttttacagttgggaaaactgagaaacagagagcttaagtgactttttcaaggccacacagctggtagcagagccaggattcaaacctaggaagttataattctcatttagctgctaggctgcacaccacatgtgggcacgttgtgtttgatggcaaggagtgatcatcaactccctggagttagctggccttgcgctggggagctggttcatgcaggaagaggggtaaagaatggaaagaacgaacaaaaattaagtcagttgtcaagctgctgccatattaagagtaaagagaacaacagggctgctgggaacattgtcagaccccaaattgttcttgacattcattgggctgagtcccttgcttctgcagctctaaatggaaatgacatggaactaaaatatatatatttttaaatctccaaactcttcacacatccgttggcatgataatattttgattagttacatttatgctccaattacactcacagaatgttcaactgtgtcttatatatagcatgtttgccatgctccatagaaaatactggattattacctcgtatatttgcaatgggaaaagacacaaatggaaagggggagaaaagacagcaaaaagaagagatgactaatcctgttaaaatggtgccgtcttgccttcacattactaaattgggtcatcgctattattgccaagctttaaaatgccagggctgggagagacatcaagtatttaagtctacccttcccctcacctgaggcttttatctcccttaccacgactgggtctgaaagcaacctcctcacatacccagtgagtggcaaggtcgacagtggggaatgtttgtgtctttgtgctctttttttcttcctggggagagcatccatctatttctcaaagagctccataaccctgtccaagataaatatataaataaataataaacagaagctaagagttactctgagctttgcaaaatgcctgccctggggatactaggagtgacttattaccgtgtgtgctgcccagatgccatcacattattttgctcttcactagtagcccatgctgcaagcactgaaggtgcgtgtatcacaccatctaacgcggataccaggtggaaggggtcccatggaggtctgctaaagatcgcccccagttccacagcacccgcccctcaaatcctcaactactggagctggctttctcccctggcttctctctgccactgcatccctaactccactggtacctctatgcctcagtttccccaaggtggttccattcatgaaggctaacccctccaccagtctccttatgaaatccaccaaagccaagcatttcatcaagttaataaaatttgttctaaccacaagtattatttgtgcacctactatgtgtctgacactaggggaacagcagtcagcatggaagagtttttatcctcttagagattacagacttctaaagagccattacaggaatgtggaaagttctatgacaaggcaagaacccagacttgatttgggggaagaagtataaaaagaaaacacctacaactttctggagcaaataaactgtaggctgaggtctaagttatgtaggtgtcagacaggggaaaagggaacagaaagaatgttccatgcagatgaaatagcctgtttcaaagccaaggaacaagacagtttctgccttgtgggggggctaaaagaaattgcagacagaatgcaagtgccttagagaccacctctctaacctctcacccttcagtttatatataaggaacttgatattcagagaggtgccctgatttgcccagagtctcacagccaaagggtgatagagccagcattcaaattgaggtgtatctgactccaagatcagtatcatttccctctgaaacagcggttcccaaatcgcagtgtgcatcagaattacttggaaagcttgttaaactgtgccgggtcccatacccagtagatttggggtggagtccaagaatctgcacttctaacaagtttctaagtgatgctgatgggactgatctgtggaccacactttgataaccactggactagctggtctctaattccccagccctgatagggcaggggcccaaaaatttgggcgaatcaacaaatggtgctaccacaggggtgctaacttgttaaactacctcctaccctgggccacgccctgcctacctctctcaggggcaggaggtcttggccactggccattaaacatgaagactctccctctgcccaactccaacagcctgagccattttctttccatcactgctaattaccaagaatataattagacacttattgactcccccaaatgtactaaggtctgcaaagaaaatagcacaataattattcctcctattttaccatcctctaaggagctacaagactttgacagctgttatccaattaatcctgacagcttatttttttaacgtaaaggtatttttttcttctaagattggaaaagctatttccttttttgaagtaagaatgagggcaaagagaggccagataacttgtccaacattacaagggtcatttcttgcctcccttctcctgcatgatcagtggaacaatgaaagataagggcatggactgttgactcaaactgccagatcaaatcccagctctgtcagctctcagctgtgtggccttgggcaacatacttaacatctataagcctcagtttctccatctgaaaaatggaggtgatgatggcaaaagttgtacatgcttcctaggcttgttacgtgaattaaatgtgtctgtatgttacacgcttagaatagtacctgacatgttgagaattagctaccatgatcatcagtggcagaagcggcatttctgagccctcatgcagatcttcgactacaacagtgagataactgaccctggaattcagcagggtaaggcaggtcccagtctcactgtccacagaggcagcgggcctagaaggcaccaggaagccatggaacatctccatgctgttgacaacaaggaacatctctctttgccagtggttctccaagtgtggccctgagccagatacatcaacgtcatggggaacccctcaaaaagtaaatccttgggccccaagctagactgactagaccagaaactctgagtggggtcagtcatctgggtcccccaggggatgctgacacccactcaagtttgagaaccactttttttccccagacaggttgcctgagcctcagcctatcagggtagaccacaataacctggcgatcatgccagttcctgtccactggatgttccctgcttttcccaagaagggacaggacaggttaccagattccacagcactgtagcatgggtccagagcctgtgcttttttaattatttattatttatttattttttgagaaggagtctcgctctgttgcccaggatggagtacagtggcatgatctcggctcactgcaaccttcgcctccagggttcaaacaattctcctgcctaagcctcccaagtaactggaattacaggcatgtgccatcatacccagctaatttttgtatttttagtagagacagcatttcaccatgttggccaggttggtctagaactcctgacctcaggcaatctgcccgcctcagcctcccaaagtgctgggattacaggcgtgaaccaccgcgcctggcctagcctgtgttcttgaccactgccctacattgtctctcttgaaactgccttcccacatgcacttctggaaaggactccaatccctaccccagtgagggccagctgggagtgcggtccttattgctgaggcaccatagttgccctggtgtgccaggaggtaggaaatggacaccaggagataatgacgactcacagaaatgacacagaaggcatctcccagaccctctgagtccttgaagccactaggatatgtccatcaactgaggcctcttgaaatcaagcacctgaacccctagattttctacggttttcatcctgaacccactcttcccctttcatccctcactcctccacctgcccccatcctctcagctgcaaagctagtttcctatttcagtcttacctttctcccattccccatccctagccctcctcccctgtcccactttttgtaccaaaatgcactttggactatcccccttgaccacaatgcagaccccaaccatctcttgggttccccttcctcttgctgctgtccacctcatccagtcaagtggtctctgcactctagaccaccaaagatactgtctctgtcagttccaccaagccctgcagtagaacctagacccagatggaaagagaacaagacaaaatcaggaagtagaggcagctctagtgctgacaactgccagggaagcaatgagctgaatgggttccctgaagccgccataacaaagaccacaaagtgagtggctgaaacaacagaagttgatcgtctcacagtcctggaggctgaaagcctgagatcaaggtgtcagcagggttggttctttctgaggccagtgagggagaatctgttccatgccctcccctagcttctggtggtttgctggcgatctttggcattccttgggttgtagatgtacccctcctccttatctctgccttcagattcacatggtttatccctgtgtgcatctgtctccatttgttaaggaaaaaacaccagtcacatcgaattcagagcacaccctactccaatatggctttatcttagctaattacatctagaatgactacttccaaataaggtcacattttgagatactgggagtgaagacatcaacatatgaatttggtgggaacagaatttaactcctaataagctttctagagccctactgtgttcatcacccaaagagttatctaaggcagtcctaggagggtttctgtagagatgacggaatatcatatttagagggagcatgggaaaatattctttttaactataaaacaatacatggggaaacaaacagaaaagtagaaaggaggagtgacaagtcctcacggaaagacagccacacatgtcttgaggtatttccttacagtctcatttgctggcataggttagtgctttccaaggagttatggcatttacttgggtttgtgactgtggttagtaaatttttcctgaagaagaggcttaatgggggataacagtttatagtggccttgtctgcattgaagctatatccaaattccaatgggaaaggagcaagcaccccttcaacagggctgcctgttcactgatgttgcaggttagtttcacaacaaatgtatattgagtgcctgctccacaccaggcactgttgtaggccccgggagtacagctgtgaacaaaacagtgaagatacttcatcagagacagtttgcggagatgaaaatgctcctcaagagctttgaaacaagttgaatagggctcctgtagacgccccccagggaatgcatgccagtttttcatgccatgattaccccttttaaaattcttgatttttagctcatctttcgaggctctgaagtacctttgcaacgattatttccccaggaaggatctatgaatggtgtattttctgagcctgtgcatttctgatgctgcatcacttttatagtatagatcacgtgcccatatgcaatttattgagtctcgacctattcccttctaaatactgtggaccggtgcttctcatcttttgccaaaagaacaaggatagcatgtttgtccctcatctgtcaaatcctctttttgaatatacacttggaaggcaggtagataggtatatctcacaccctaattcctaatatagggaagatttttttttttttttttaatcttacagccttgttcttaggagcacagcacagcaatgaagatgcaggctctggagccacacccctgcagtcaaaacccagccctctcatttcctaaagtgcatccctgggcaaattacatagatttttctctgtctttgtttcccaatctgtaaaatggagataataaaaagacaaacctggccaggtgcggtagctcacccctgtaatcccagcactttgggagtccaaggcaggtggatcatgaggtcaggagatcaagactatcctggccaacgtggtgaaaccccatctctactaaaaatataaaaattagctgtgcatggtggcgcacgattgtaatctcagctgcctgggaggctgaggcaggagaatcacttgaacccaggaggcggaggttgcagtgagccaagattgagccactgtactccagcctggcgacagagcaagactctgtctcaaaaaaaaaaaaaaaaaaaacccaaaccttacaggatcctcagttaagcttgaggattaactgaattaatacaggtaatagtagaaaggctgacaaactttttccataaagggccagagagtcaatattttaggcttagcaggccgaaaagtttttgttaacaactactcaattctactgttggggtgtgacaactgcagagacaatggataaatggatggatggatgaggctgtgttccaacaaagctttacaaaaacaggcagctgaggggtccatgcataggctgtagtttgctgacctctgacttagtaccaggcaaatactaaattctcaatcaatgttagccattattattaactatgatgagattcagaaggacaggggttggatcctctctgtcactcactgcctggttctctgacactatgaacagatggtgtacatgaaaaaccaccatccacagaagtattccttccagcccacctatagcactgcacttgtgaaaacgacaccttccaagatgcaatgcgctgccacaatgtctctgataatttttgccctgttgtatttgtgagtttcagccttgagcaggatgtgaaaagaaaggtgggaggaaaacaatagaacattaagtgcttcagaaagtcctcttcatgctgtaaagggatgtctgtcccatttagattggtacagacctttatcttctactagagggacagagaaggatggatgcacatcttccttttgttagtggcacggcataggtggctgagctctgtttttccgaccattcctattagccttggagttgagggaaaactctcccagattctgtcaaaagttcacctgtctcactttccagtgttgctatgatctgatgcttttgtgctgttctcatgggaatttttaagggaaactgcaagaggttgggattcccaaagtctcttaaggttatttccaccatggactctgtgtatggtggaaagagttcccgagccctgtgctctctgtggcactgtctcatttcaaacacataaatccaatgctttatctacttcttgggattttctggttattttttttaccacctacaccaagggttaagccatgccccacttttcccttgtcctgaccaaaattgatatactacgacccagggccaaaagcatagacaacaggtgtgggcgaaaattctctacttgtatagaaattatttgaagaaattcctgcttaatcgggcttcaatctcttccactcccttatatccattcatttgttcactcattcattcattcttttactaattatgtgcccgctaaacattcactgagcaagctttatgtacttggtaccaagcatgcagagacacagaataaatattttattcttgaagacatcttgctctaaatgggtatggtgcatctggtgatgccctgcccaggtctctctttaaagaaacttgtctccccagctgccagggcacttaggcacacagtctttagcagtagcccctccagggactgtgtcagctgcagagtgtactcccaaggtctgcctttctgagagctgcacatccagcaactgatggaggctagggttgaaagcctcagccagtcctgcccgttgcagactcggacgggccattttagctccccgtggagttggctaatgatgtcctgaggtctgcgtcaactcacttcctcccgcagcctgctgctcatcccttccttcccttccatagctgctagtccagggggcaatttccaataaacatcctaataaacactcatctccatctctgattctgaatcccagagaatccaacagtgacaatgggtctggggaagcaagttgctctgtctgggcatttttgaggggacatttgcgttggttctttaaaaacacacaggaatattccaggtagagaaggaacgatcatttcaggcagagggaacaggacgagaaagtccaggactatgacagcacagaggcatttggtgtcctggcctgactggtgagaggggatgtggaggcccaggaagaggaccaaagcaagtccttgatagtcaagctaaggagctgaccatgcaccaggagcccatgggtgtttatcagaagaaatgggacgtaataaaatattcatttcaccgagatgagttgtctttgtcaaggttccctctaaaaaacaggagctaatctggatgcgtcaagtagatagttttcatacaaagactcagacctttatccactactgggaggctggggaatgtcagtggggaaggtagtcctcaggaaatccctaagtataaggaccacaggaaaagtcgagtctgtagttttggctacttgggtgactgttgggtagatgctcaacaaacatgggcacacctcaaagtctgctgactgcccgcacccctgcaggggctctcagctgccggagggaggctcactgttctctggttctttgacctttcagatctctcatcagtgggatctcactgggaccctgcaggtgaaggaatctgggaaacgtggcttctgggcttcatgaccctttggtataggagagcacttagggagctgtgcatcaacaagcaatatgtgacttgggtcacagaggatgtggctgcagcaaggagattagttagggggttgaatcaaaagcccaagcacgagatgttggtgccatcatcacgtcactgcccaattctccttcctctccaaggcctccaaacctgctctgaggcttggcagggaaagtgagccagactgaggacaggagaaagggctgccggaaacaaacgcaagggacacacagccctgtcccgccaggtgtgactccaggtgccaggtgtgactcctgccaggtgtggctcccggatcaggatggctgctcttcactcactggcatttgggtgagaagggcactgagatggagcagggataaccaatccagaagacagaaaccctggcttggagccctttccagccatttcctaattggatgtatgacttttctagggctgccggaacaaattaccacaaacttggcggtttaggataacagagattcattctctcacagttctggaggccagaagtctgaaatcaaggtgggtcggcagggccgtgggggaagtctctaggggataattcctctttgcctcttgcagcccgtggtggtgtctggtgctccctgaggtcgtctctgcctctgttttcacatggtcttctcctcatgcctcgcatttcaaatctccctctgctttgctctcacttttgcagctatcattggatttaggatccaccctaaatccaggataacctcctcttgagatccttaactcaactgcatctgcaaagatcttttttctacataaggtcacagtcacaagttccaggaattacaccttgcacaatgctggggggccgtgattcaaccccactacaactacactgggtgactctgtaaatgtcacttaccctcatgcttagacttaaatttgtactaataaaatagagtaggggccgggcgcggtggctcaggcctgtaatcctagcactttgggaggccgaagtgggtggattgcctgagctctggagttcaaaaccagcctgggcaacacagtgaaaccccatcgctactaaaatacaaaaaaattaactgggcgtggcagcgtgcacctgtagtcccagctactctggaggctgaggcagaagaatcgcttgaacccaggaggcagaggttgcagtgagcagagatcatgccactgcactccacactccagtctggctgacagagtgaggctccatcaaccaaaaaataaaataaaataaaataagagagtgcgaggagaagatgacctacctggatgttggggtgattacataagacagaacaagtcaaagccccggcccacttatacacacaagggaagcctgaattaaatatctattgaatctgaatcagctctcaccccacggctatgggactggtctggtcaggacctggagactcctagttcatgcagcgtaacacaaagctcagtttgcatttaggattgcactagattgccttaaaagcagtacgcagttctgaagcttaccattgtataaaataatacctggtgtctatagtccttcatctgttcaagtacaggttggatggaaggatttccagattcctgtggatttaggattcctacaatactgtgggcatcagattcactgcaagtaactttcccagcaactgaaacactgttcccacccaaaaggggaaaatcagatcacttccacatggtggaaaaactagattacttccaccatagaagtctttcgacgctgcctctcccctttgcccgtccaacccgccccaggtcttaattcctgtccttctatttaggtttaaatcattgcacaatcactttctgactatataacttagaacaagcccctttgtacttcatttgttttccttttatgctctttaaattttaataaattaaaagtggcagaaaattgagaaagctacaaagaataaaattataaatacccataactctgccatctagcttcaaccactgtgaacatcttaacatatttgctttccctttttatttttaaagaagaaagattactttattgttattgggaaatgatacatattcattttgaggaattcaagaaatgcaaaatacaaagattgaagtttaaaaaaaatcttaagtttcactacccagaaataactgtcattaacatatggcaaacatcattttaaatatcttatgatatacacagagacaaaaggacagacggatggatggatgaggatgggcggatggacggaagaataggtggaaataaatactatgaaatgtgggataaaatatatgtcactttaagtttttttttaacactgtatttgtctttacttgtatgtagcagaagaaaaagaaattaaaacaaaattgaaagaaaactagcctttcaaatacttctttaccaagagatacttacccaaagatctctttaagaacacagattgtgaagaaagcattaagagcttgaagtaattatactatattttaactatttattttgatgttaagcttatctaatgactccatgctgtcaaatatggtattagaactatcacacttcccctcaacttctcctccctctctcaatttctcagttttaattgttggtggccgctgttgttacactgcccaggttttaaccttcataccctgatctataactgtaattgtctaagttgcttactgtgagtcctatatttatatggtttcattacttatcatcaatccttatgttatgaggtctgcattcatgaatcttttatttttgtttgcttttaattagttgtattttgtaattaagtatttttgtcaagatcttatggatattacactgcctgagtacatttactcttgacaaccatgacttgtgagctttatattctattatattcttgaactatgctttctttccctcaaatcttttagataaccattctttcatctttgacattgaatcctgctgtagagaagtctgaggacaacttgactttttttttctccttgtggaggatattcttgtgtctagaatactgggtaattctgtatttatcctaagttttaatagtttaactagggtatgtcttggtatctagcattctgtaccaaattttcctggaatacattgtctctttattattattttactacaatatgtaacataaaatttagcattttaattattttaagtgtacaattcggcagcattaattactctcacaatattttggaaccatcaccattatttatttctaaaactttttcatcaccccaaagagaaattttgtaaccattaagtaataactcttcattctctcctgccccagtctggtaacctctaatctactttctatctctatgaatttgcgtactctagatattacttataaatggaatcctgtagtccaaaaatgaacagtaacaatttttgggaggatatggagcaactggaatccttatacactgctggtgagtaggtaaaatggttcagctgcttgtaacacattctcttttgatttgcacattcagttatttattcgcttcaggattttttttttatccagaggcaaaatagcatcattctactcttttgaatcccaattctgttatatatactagacatgttgccttgggcaagttacgtaactatatcttaatttcctcatctataaattgggaatactaattgtattaacctcaaattgttgtgaaaaattaattcatgtaaacctctaaataaatgtttcatgcataatcaacgccaaaataatttgttattgttgttatactaagctatattttgttatatttgaataaataaaaggttatatgtttatacctttagagtatatatctttatgtctgtatctattgtagaataaattgctttctcctttagctttctttatgttcatattcagttgactactttcaccactctatttcatctgtattcatgtgcttgttaagacttccctctacactgttttttccagcaatgtatattctattttgtttttgtattgtttcactttttgctgtcattatttatgggctctttaatcctattaatgctattttgggcctcaatttgtttccttttgtccctattaatctcatgctgtccatttattccattatcctgaaccctcgctttattgacctggtgttcatatcaaattgttctatagaatgaagcaattgtgaataatttacctctgtttctgaaatgttatttttttaggttagaatccttgcccttgtatattacagccccctgcttgcttgcatcccttccttcctttttcttccttccttccttgccccctcccttcctctcttcctccctccctcttttccttctttccttccttgtttcttttctcttcctccctttatttttttcaaaattagtatttgtggtatgctttaatgttgccatgacatttcttaccttcttgttctgcctaggtgactccactcgggtggctccatcctgacatgccatttgctatgatatatagcatatgtgacacctgactttcttcctaccatatcagggaagtttgttttccccttgaagtttgaagattgagtattctttattctgtctgatttctgagcctaatgaaacagtgagaaggaaggagagagctcatctaaggtgatatttggtcattcttagattactgggcatctgtttcttctttttagattttgtgaatatcccatactcagattcactacatctacttgcaggtatttacttttctgatgagaaggtagtccctattttcatttatcttactcaatttagaagacagtcctgaagattttgctaccattagagaaagttaacctcctccataacccccttcctttgctttgtttatacccccatcccggccccaagccattttttcttattacttaatcatatgagagaaaggataatgatacccagtaaacttgattttctctagatgtttggtattgaggaatccccaaactatgttactaatatgctttttggtgggtggggaaaaagatttagaagcctagctatacctctccacatcactctgtgtctcctgtttctttccatacttaccagtgtttaaaacttgcatttgatagttttctttcccttgttttggtgttgtggtgaattttatttatttttcttttcttgtattcttgtttgctcaatctattacgtatttgtcaagaggaattctgtaattcagtttctgtcagtgatcttaacgcaaatatctgagtcacactttccataagtaagttgggataataattataatactgaactcatgaatttttttagaagtactaagttagataatatatgtaaattgctttgcaagctctcaaattttatatgaagaatatgttttcaataaatgtagttatgaatgaatgagctgttattactctgcagtaatgaacttagttatctaatttataggattataaaatgttagcacttaaatcagtcctaggaatcacgtagcacattccatttattttataaaggaagcaaatgtcatgactgccatctttagtgccatgtttcatcaggaggtgggtgacacaagaattctgtggttataattgatggcaagcatgtcattcataagaattctccttgcaaataaacttcatgtgttagaagaaatatttttattcacttctcagaaggaaggttttttcaatcagaaggcccctattttgctgaacaccaacattagtttaaacacgcaagcttgtgggaagaacccagaagcaaaacctaattgccttccataacagaggggaaaaaagtacaacagaagagagaaaagagatagaacaagctagaccaaatgctgagtaagaaaaatgaagagttaagtaaaagcaatgggggtacaggtgagaatgaacattgaaaaaaagatggtctgatattaattttcagttgtttcctctgaaaggtatactttctccatctcacacaaggaatatttattaaagtttatactattcactgatgtttttgtagtaggtttttgaaaggcttagtcctgaattcatttagatcttagtaaagaccaagcagacatagcacgttcatttgcagaagctaaagagtatgggatctactgaattatttatgttggtcaattgtgtcctcttatgttcaaacacagcactggggtaggggggatagagtgtggtagagggctgagctgaaggagcttagcgtttgtcagatgactgactgaagagatgagtttaaagctaaagggattgccaacaccaaggatggaggcaaagctcaaaccatggtgaaaatcagaggttctgatacatggcaaaggaaaccagtagcaaagtaagtttacaacatttgcttcagcacaacaaggaaacattttttctgccaggtcaaacttagaagttgtcatctgcttcctaacgcaccttaggaggttcatccaagcctgatattaagataaaattaaaaaggtacaaaaataaatattttcagtcaaaaaaagcaaaatgatcactgatatttgtcttctagggcctctctgaaatgatcataagtggatttttaaaagtgtttaggctcacaaaaacaatcagggcaagagagaggctgagttgacagggcttctcatcaaccactttggatcctggggagaaatgtcaccataacttcaaatttttaagagtgatctttagtcaaaaattgtatacccagcaaaactatcaaataaattagacccagacattttgagccacacaagactacttactctttcttgggaaattatatgagaatgtagtcctgtttgaacagaaaactttttttttctctttttttcatttcattttaatatcagggttatgaacatctacaaaaatgagtctggaggaaactttcaggctgggagctggcacacacacaaaagtcttctttcttgggctgaagccagtaatactaactgtgaaaagccacctcatctcagacgacagccatgattaatattcagtgaagattggaacagtaggacaggtggctctggaagtgagtaagatctctcatgaaataagagaagttgatagctcagatgctatgataaaagtaagtagtggggtgtaagtaaaagagagaatcccttcaaccttaaaggtaggagcattctcctttgagaggtagagaagatatgctcgagtccagcagaaaaggaaatataatcctagcacacggtttggttttgcaatgaaacaatttacacagtaagaataatggaagagctatgtatccactttcaacttttagaatcattaaactgactgatatggtttggctctgtatccccacccaaatctcatcttgaattgcaatccctacatgtagaaggagggacctgtaatccccacatgtcgaggaagggaggtgactggatcagagggaggtttcccccatgctgttctcatgatagtgagtgaattctcatgagatgtgatggttttaaaagtggcagttttttcttgcacagtcacactccctcatgctgccctggtaagaaggtgcctgcttccccctcgccttctgccatgattgtaagtttcctgaggcctccaagccatgcttcctgttaagcctgtggaacttgagtcaattaaacctctttcctttgtaactacctagcctcagggaagttctttacagcagtgtgaaaatgagctaatacactaaccaatcatgaaaggcaagaatcgttatggagaaaagcctaaaaattaccaaccttggccatgaaagcgtaaaaacaaggatgacaatgtcaaagacagaggtgattgggagaaggggagatcaacaatgtcttcctcaccttacccagaagaccctgatggttcctagaacaagaagcagaggctgaagtaaactatagcatctgaatttgcaaagattaccagtggtagacataaaaagtaaacatttactataacagaagctagaaagtgatttaaaagggcaattcctcatttttcttagcagaaagccagtagacaacatattaagttaataagtcaagaaaagcactttaagtaaactacttacacatgtagaaataaccaccaaagaagcaaaaatagaaatggatgacctgtgagggcgggatctgaaaggcagagaagccaaacagcatatggtggtttttaaacatgaacccttctgagttatttgacatcttaatcatgtttggttttttttttttttttggtttaacagatctttgaaaatgaaattaaacataaaactatagaacaatctcacctatcaatgtgtacacaataatactccctgaattaaattaaattgtgatatgaaaaagaaatatatgtatattcagggacagtatgcttattctaggaaaggaaagactgtttgaaaatataaaatgccttttgttatgatttcagcaggatgaggtgagaaaaacaatctctaatccattgttgcggaagaggcttttggtaaaatcttttcaatatttttggctttaagaaagtcagtattttatgctggagccagggaggctggagggcttgatcccaagatttgtccccacagcccaacacactggctgtggcagtctgaggccagcgtgcctcttcaggcctaaccctgacctatccttcctcattgggcagggcttccctgcagaaactccaataactccagctagaggctcaaggacagaattcggatccccctggacctgagccccggcgggaggggcagccacagtttctagggaccagcagacttagtctctcttcctggtagctctgaggaatccaggcagcccagacaagtaggtttccccccagcaaagcacaccctctccaccaagtgacaaagtgtttcattaaatgggtcctgatccccgtgccacccaactgggtgagcccctccaacaggggttgtcagataccctatacaggagcaaccctactggcatcagtctggtgcccctcgaggtcagaggccccagaagaacgagcaggcacccatctttgctgctccccagcctccttgagtgacatctccaggcacaggagcaaatcagatgactaggtcctaaagtgaacccccagcaaactgcagaagccctaatgaagagggacctgactattgaaataaaaataaagaagcagaaagtgacaacaacagcatcaacaacaacaacaacaaaaagacccaaaaaaaaaacccattcaagggtcagcagcctcaaaaacgaaaactaaacaaactcacgaatatgagaaagaatcaacaaaaaaatgctgaaaacacaaaaggccagagtgcctttcctcctccaaacgactgcaacgtcgttccatcacaagcataaaactggatggaggatcagacagatgaattgacagaagtaggcctcagaagatgggtaatgaaaaactaagttctaacccaatgcaaataagctaagaaccttgataaaaggttacaggaattgctaactagaataaccagtttagagaggaacataaattacctgatggagctgaggaacataaattacctgatggagctgaaaaacacagcacgagaactttgtgaagcatacacaagcatcaacagccaaactgaccacgcggaagaaaggatatcagagtttgaagatcaccttactaaaataagatatgcagacaagaatagaggagaaaagaaggaaaaggaatgaacaaagcctccaagaaatacagggcttcataaaaagactgaacctacaattgactgaagtagcagaaagagatggggagagtggaaacaagctggaaaacacacttcaggatattatccaggagaactgccccaacctagcaaggcaggccaacatacaaattcaggaaatgcaaagaaaccattaagatactctccaacaagatcaactccaagacacacagtcatcagattctccaaggtcaaaatgaaggaaaaactattaagggcagacagagagaaaggccaggtcacctacaaagggaagcccatcagactaacagtggacctctgggcagaaactccagaggccagaagagattgggggccaatattcaatattcttaaagaaaagaattttcaactcagaatttcatatgcagccaaactaatcgtgataagtaaaggagatataaaatccttcccagacaagcaaatgctgagggattttgttaccaccaggcctgccatccaagagatcctgaaagaagcactgaatgtggaatggaaaaacaggtactagccactgcaaaaacatactaaaatataaagaccaatgaaactatggaggaactgcatcaactagtgtgcaaaataaccaaatagcatcatgatgacaggatcaaattcacatataacaatactaaccttaaatgtaaatgagctgaatgccccaattaaaagacacagactggcaaaatggataaggagtcaagaggcattggtgtgctgtattcaggagacccaacttacatgcaaagacatacatgggctcaaaataatgagacggaggaaaatctaggcaaatggaaagcaaaataaaaataaaaataaaaaaaaataaaaaagcaggggttgcaatcctaatctctgataaaaaagactttaaacaaagatcaaaaaagacaaagaaaggcattacataatggtaaagggaacaattcaacaagaagagctaactattctaaatatatatgcacccaatacaggagcacccagattcataagacaatcttagagacctacaaagagactcagattcccacacaataatattgggagactttaatacctcactctcaatattagacagatcaatgagacagaaaattaacaaggatattcaggagttgaactcagctctggatcaagtggacctagtagacgtctatagaattctctacaccaaaatcaacagaatatgcattcttctcagtgccacatggcacttatgctaaatcaaccaaataattggaagtaaaacactccctaggaaatgcaaaagaactaaaatgataacaaacagtctctcagaccacagggcaatcaaattagaactcaggattaagaaactcactgaaaaccacacaattacatggaaattgaacaacctgctcctgaatgactcctgggtaaataatgaaattaaggcagaaatcaagaagttctttgaaaccaatgagaacaaggagacagcatgccagaatctctgggacacagctaaagcagtgttaagagggaaatttatagcactaaatgcccacatcagaatgctaggaagatatcaaattgatatcctaacatcacaattaaaatacctagagaggcaagagcaaactaatccaaaagctagcagaagacaacaaataactaagatcagagaagaattgaaggagatagagacataaaaaaatctccaaataatcaacaatgcagaagatggtttttcgaaaaaattaacaaaatatatcactagttagactaataaagaagaggagaaagaagaatcaaataaacacaataaaaaatgataaaggggatattaccactgatcccacagaaatacaaactgccatcagagaatactataaaaacctcacgtaaataaactagaaaatctagaagaaattgataaattcctggacgcatacactcaaccaagactaaaccaggaaaaagtcaaaaccctgaatggaccaataacaagttctgaaattgaggcagtaattaatgggctaccaaccaaaaaaggctcaggagtagacagattcacagctgaactctacctgaaatgcaaacaggagctggtaccattccttctgaaactattccaaacaattgaaaaggagggactcctccctaactcattttatgaagccaacatcatcctgataccaaaaccaggaagacacaacaaaaaaggaaaacttcaggccaatatccctgataaacatcaatgtgaaaatcctcagtaaaatactgacaaaccaaatccagcagcacatcaaaaaacatatccaccatgatcaagttggcttcatccctgagatgcaaggctggttcaacatacacaaatcaataaatgtaatccatcacataaacagaaccaaagacaaaaaccacatgattatctcaataggtacagaaaaggcctttgataaaattcaacatcccttcttgttaaaaactctcaataaccttggtagtgatggaacatatctcaaaatgataagagctatttatgacaaacccacagccaatatcttattgaacgggcaaaagctggaagcattccctttgaaaactggtacagacaaggatgcctcctctcaccactcctattcaacacagtattggaagttctggccagggttaccaggcaagaggaagaaataaagggtattaaaataggaagacaggaagtcaagttgtctctgtttgcagacaacatgattttatgtatagaaaaccccaccatctcagccacaaaactccttgaactgataagcaacttcagcaaagtctcgggatacaaaagcaatgtgcaaatatcacaagcattcctttacactgacaataggcaagcagagagccaaatcatgaatgaactcccattcacaattgctacaaagataataaaacacctaggaatacagctaacaagggatgtgaaagatctcttcaaggagaactacaaaccacttctcaatgaaataagaggacacaaacaaatggaaaaacattccatcctcatggataggaagaatcaatactgtgaaaatggccataatgcccaaagtaatttacagattcaacactgctcccatcaaactaccattgacattactcacagaattagaaaaaatagttttaaatttcatatggaatcaaagaagaccccaagacaatcctaagcaaacaaaacaaagctggaggcatcaaactacttgactttaaactatactacaaggatacagcaaccaaaacagcatggtacctgtaccaaaacagatatacagaccaatggaacagaatagagacctcagaaataacaccacacatctacaaccatctgatcttcaacaaacctgacaaaaacaagcaatggggaaaggacatcctattaagtaaatggtgctgggataactgcctagccaaatgcaaaaacagaaagtggaccacttccttataccttatagaaaaattatctcaagatagattaaagacttaaatgtaaaacccaaaaccataaaaatctcagaagaaaacctaggcaataccattcaggacataggcatgggcaaagacttcatgacaaaaatgccaaaagcaattgcaacaaaggccaaaattgaccaatgagatctaactaaactaaagagctcctgcacagcaaaagaaactagcatcagagtgaacaggcaacctacagaatgggagaaaatttttgcaatctacccatctgacaaaaatctaatatccacaagttacaaggaacttaaacatatttacaagaaaaaaacaacccatcaaaaagtggcaaaggatatgaacagacacttctcaaacgaagacatttacgcagccaacaaacatgaaaaaaagctcaacatcactgatcatcaaagaaatgcaaatcaaaaccataatgagataccatctcatgccagtcagaatggtgattattaaaaagtcagaaaacaatagatgctagtgagactgtggagaaatgtaaatgattttacactgttggtaggaatgtaacaaccattgttgaaaacagtatggcaattcctcaaggatctagagccagaaataccatttgacccagcaatcccattactgggtatatacccagaggaacgcaaatcattctactataaagacacatgcacatgtatgtttagtgcagcactatttacaatagcaaagacatggagccaacccaaatccccatcaatgatagaccggataaagaaaatgtggtaaatatataccatggaatactatgcagccataaaaaggaatgagatcatgtgctttgcagggacatggatgaagctggaagccagcatcctcagcaaactaacagaggaacagaaaaccaaacaccgcatgttctcacttataagtgggagttgaacactgagaatacatggacacacagaggggaataacacacaccagggcctgttgaggggtggcagggtgaggggagggaacttagaggatgggtcaataggcacagcaaaccaccatggcacacatatactcatgtaacaaacctgcatattgtgcacatgtatcccatttcttcctttttttagaataaacaaaatgtaaaaatgaaattaaaaaaaaagtttattactcacatcctcctcaaaaaaagtcagtattttagatgtagaagaatactctattagaataacagcgcccatctgaagccaaagacaacatcatatataagagtcaaacactgaagccacttctattaaattcaggaatgaaacaaggttatacttacattattcaatattgatttgcaaactctaagcaataaaattaaaagggaagaaagagaaggaagaagttagaaagaaagaaattttttataataatagaaaagcaagagataaaattaccattattttcctgatgatatgattgaatacctaaaaaaaacacaagcatcaactcaaaaacttgcagtactgattaaaaaaaaaagttcagtaagatgagtggttaaaaaacaaatagataaaacacaacagctttcttatatagcatcaataaccacttggaagctctgacaagaaataaattaaatcccatggtagcaaataactaggaatcaacttaaacagagatatgagaggtccagatgaagaaacccacaaaactttactgagggaaataaaagaatccttgaaaatgtgaagatacaggtaacgattctgagtctgaagactcaataaagtcaagatggaaattatcacaaaaataatttgagcaatattttcaattcgaataaaacccaagaggagttttctggaacttggcaaaataattctaaagatcatttgaaaggagacacaaagagtctctctctcttttgttttgttttgttttttttcataaagtgtaactagaagagaatgtcctattaagaattaaatacctagtaaagccacaataattaaaagagtgttgtactgacataaaaacagacaggctaatgacaagaagaagaaagaacatcaatagaccatatatgagaatgcatttgatgagaacagccccacttttaatgaggggagaaaggctaaactattaattcatggttctggaatactgattaactatagtatttgaaaaaacaatggacttagattctattcacatggtgaatgaaaaattaattaactagctaattaattaattcataactataaagagttgaacatgaagaagaataaaaaatcaaatcattaaaatctagaaaaatacaagagaatatttatctcatttgggaatagggaaataacttttgaagttcaaaagcaaaagaagatataaagttttctataatggacaacataaaaattaaaactattcatcagagacatcaaaaattctgaaagcaaataaaaactgaaaaaatgtaagtaccaggtaaagaataatatcctttctccataaaaaagcttataatatacatatatggaaaatataaaaatgtttatgaacagataattcacagaggacaaaacataaaatatatttggctatataataaggaaaaaccaggtcaataggatgcagtgtcatttcttatcaaataagctaagattttgaaacagtgataattcctaatattagcaaatagtaaatgagtaattacctgatgcttggactaccagttgtctcaatgattttctgaggagcaatttgataatacgtatcacattatcaagttgtgaatcatataacacaatatgaatcacatatcacattaaaatgcccacaccaccaattgaataatcccaatctagaagacataatgagaaatcataacaaatatttaggtgaaaaatctcacgacagtattactgtactgaaagactgaaagcaatttcaacacccaagtgtaaggacgtaattaaataagtaataatacggcaatatgatataatttaattgatgtaaaagtccaagcattcaagaatatttaatgacataaaaatgttaatgatagaattctaaatgagaaaaaaaagccatgtaacaggacttatagcttgcacctaattttgtaaaatatatatatacatttagcaaacgtatgagcatatgcatacacatgtgtgtatataaatagtaatctacatatagaaaaacgacttgagaagagttcaactttcaattaaacatcacaaagtaaacacatgcattaacctccattttcttccaaatgcaccaaaatgacagtgtaggaattaaaaagacataaacaaacccatatataccaagagaatggggaaaaaagtgacagcaattgagagatgcaaacattttggaggaagaaaaatggttggacaaatggtaactgattaagcagagcagtgaaaactgaagcccgtatgtccatcaggtaagaaagcagaatacaaccaatttaacccatggagtaccaaaaggacccagaaatggggcaaccagattattctaacggcaggaacacctagggctgaaaacaaaattacctgaaaatctgtataagaaatgttaagacaaccacccacaaaaccccctttgacatctgccatgcgaccagatgccagtcccttctcaatacctacataagactgaaaatgtagttactacaacatatcaagcagagaggatatagcttcaaggattctgtggccagctgagagggggtaagtcaccaggcaaaaccacgggtgatccactgaaaccaacatactgagtgaagacagcatcccccaattagctctgagtacccacagccaggttacacatacttcccatgccttcatgagtgcagaaggcttatctttggaaaaatttaccagatggagaggaaaaggccttagccgtgaacattccaatgttcatccataaaaatccagtttactgtcttatttccatatagtcaaacctgtcagtgaacaaagcccctcccatgcaatacatagactcaaaattttagtgccaatctcttaaatatgaatggatagccaatgatgatgactatttgagttaaatctctaacatgaacagaagagaccaaaacaaacagggaggggaaaagtgcaggtagaaaacaaaagataagtgcttctcagccttttggctaagatcaaatgtagtatctcttcttatcagtttcatatgcagagcagtgacacgataaagcaaccacacaaacaagctggcatgataaccaactaacaacaaaatggcaagatcaaattcacacatatcagtattaactttgaatgtaaatgggctaaatgttccacttaaaaggcacagggtagcaagctggataaaaaagcaagaccaaatggtatgcaatcttcaagagacccatctcacatgcaatgaatggcacacaaaagctcaaaataaagggatgaggaaaatctaccaagcaaatagaaattagaaaaagcaggggttgcaaccctcatttcagacaacacagactttatccagccaaagatcaaaaaagacaaggaaggccattacataattgtaaaggattcaattcaaaaagaagacctaacctaaccctaaatatatacacacccaacacaggagcacctagattcatgaactaagttcttagagacctacaaggagatttcaagttccacacaataatagtgggagactccccactgagagtatcagacagatcattgaggtagaaaattaacaaaattatctaggactttaactcaacattggaccagatggatctgatagacctctacagaactctctaccccaaaacaacagaatatacattcttctcatcaccacatggcacatactttaaaagtgaacacaatatgacataaaacaatcctcagaaaatgcaaaagaaccacaatcattccaaacacactcttagatcacagtgcaataaaaatagaagtcaacactaaaaacattgctcaaaaccatgcaattttatgaaaattaaacaatatgcccctgaataagttttggataaaaaaaagaaattaaggcagacatcaagaagttgtttgaaactaatgagaacaaagatacaacataccagaatctctgggatacagctaaggcagtgttaagagggaaatctatagcactataaatgcccttatgtggtttggctgtgtccccacccaaatctcattgtgaattgtagttctcataatccccacatgtcatgggagggacctggtgggaggtaattaaatcatggtggtggttacctatatgctgccattctcataatagtgtgtgagttctcaagagatctgatggttttaaaggagatggccccctttttcttggcacttctccttaatgtcaccatttgaaaaaggacatgtttgcttccccttccgccattattataagtttcctgaggcatccccagccatgctgaacggtgagtcaactaaacatctttgctttataaattacccagtctcttgtatgtccttatcagcagtgtgagaatggactaatacagtaatttgataccagtagagtagggtgctgctataaggatgtccaaaaatgtggaagctactttggaactgggtaacaggcagagattggaacagtttggaggatttagaagatgacaggaaaatctgggaaagtgcagaatatcctagagacttgttgaattactttgaccagaatgctgatagtcatgtgaacaatgaagtccaggttgagatggtctcagatggagatgaggaacttgttgggaagtggagcaaacgtgacttttgttatgctttagcaaagagactggtggcattttgcccctgccctagagatgtatggaactttgaaactgagagagataatttagggtatccggtagaaaaaatttctaagtggcaaagcattcaagaggaagcagaaaataaaaatttctaaaatttgcagctgacaatgcaatagaaaagaaaaacccattttctggggagaaatccaagcctgctgcagaaatttgcattagtaatgaggagccgaatgttaatcaccaagacaagggggaaaatgtctccagggcacgtgaaagaccttcacagtagcccctcccccagaggactaggaagaaaaatggctttgtgggccaggcccagggacccctgctgtgggcagcctaggaacttcgtgtcctgaatcccagccactccagtcatggctaaaatgggccaaggtacagctcaggctatggcttaagagggtgcaagtcctgtgccctagcagcttccatgtggtgttgagcctgagggtgcacataagttaagaattgaggcttggaaacctccacctagatttcaaaggatatatggaaacacctggatgtccaggtagaagtttgctgcagtagtggagccctcatagagaacctctgctaggacagtgcagaagggaaatgtggggttagagtctccatacagaatctccactggggcactacctagtggagctgtgagaagagggccacagtcctccagaccccagaatgttagatccactgacagcttgcaccatgtgcctggaaaaatcacaggcactccacacaagcccatgaaagcatccagaaggggggctataccatgcaaagccatagggaccaagctgcccaaggccatgggcacccatctcttccatcagcatgacctgtatgtgagacacggagtcaaagtagattattttggagctttaagatttaattactgcctgattctagatttgcatggggcctgtagcccctttgttttggccaacatctcccatttggaatgggtgtatttacccaatgcccgtacctccactgtatctgggaagtaactaatttacttttgattttacaggctcataggtggaagggactcacctcatctcagacaaaactctggacttggactattgagttaatgctggaatgagataagactttgggggactgttagaaggccatgattggccaggcgcagtggctcacaccagcaatcccagcactttgagaggccaaggtgggtggatcacctgaggtcaggagttcaaaaccagcctgaccaacatggtgaaaccccatctctactaaaaatacaaaattagctggttgtgggtggcacatgcctgtaatcagagctgaactgaaggaaatggaggcatgaaaaacattcaaaagatcaatgaatccaggagttggttttttgaaaaagttaataaaatagactaataaataaacaagaagagagagtagatccaaataaatccaattagaaatgacagaggggatattaccattgactccacagaaataaaaattatccttagaaactaccatgaacacctctatgcccacaaactagaaaacctagaagagctgaacacatttgtggacatatacaccttccaaagactgaaccaggaagaagtttattcccgaacagaccaataatgagctctgaaattgaattggtaataaatagtctaccaatcaaaacaagcccaggaccagaaggattcacagctgaatactaccagatgtacaatgaagatctggtacccttcctaccgaaactattccaaaaaattgaggaggatagactcctccccaactcattccatgaggccaacatcatcctgatacaaaaacctggcagagacacaacaaaaaaagaaacttcaggccaatatccttgaagaacattaatgcaaaaattctcagcaaaatacttgcaaaccaaatccagcaaaacatcacaaactaatctaccatgatcaagttggcttcattgcaaggatgcaagtggttggttcaacatgtgcaaatcaataaacgtgattcatcacacaaacagaactaaagacaaaagccacatgattatctctatagatgcagacgaggctttcaataaaattcaatatcgcttcatgttaaaaactttcaatacactacgtattcaaagaacatatctcaaaatagtaagagccatctatgacaaacacacagccaacatcatatggaatggggaaaagctggaagcattcccattaaaaccagtacacaacagggatgctctctctcaccactcctattcaacatagcattggaagccctggccaaagcaataagccaagaggaagaaataaagggcatccaaatagtaagataggaagtcaaactccccctgtttgcatacaacatgattttatatctatataaatcaggatacaaaatcagtgtatgaaaatcactagcatttctatacaccaacaacagccaagctgagtgccaaatcagaagcacaataccattcacaattgccacaaaaagaataaaatacctaggaatacagctaaccagggaggtgaaagatctctacaatgagaattatgaaacactgctcgaataaatcagagatgaaacaaacaaatggaaaaacactccatgctcatgataggaagaattaaatcattaaaatggccacactgcccaaagcaacctacagaatctaccaaactaccagtgatgttcttcacagaactagaaaaatctattttaatattcatatggaaccaaaagggcctgaatagcgaaggcaattctaagcaaaaacaacaaagctggaggtatcatattagctgccttcaaaccatactacagggctacagtaaataaaacagcacggtataggtaccaaaacagatctatagaccaatgaaacgtaatagaaagcccagaagtaaggccccacacctacaaccatctgattttgacaaggctgataaaaacaagcaatggggaaaggactccctgttcaataaatggtactgggataactggctagccatatatagaagattgaaactggaccatttccttataccctatacaaaaatcaactcaagatgaattaaagacttaaatgtaaagccccaaactataaaaaccctagaagacaacctaggcatagggacattctgtacataggaacagcaaagatttcatgacaaagataccaaaagtgattgcaataaaagcaaaaatggagaaatgggatctaattaaacttaacagcttctgcacagcaaaataaactatcaacagagtaaacagacaacctacataatgcgagaaaatgttggcaaactatgcatctgacaacagtataatatccagcatctataaggaacttaaacacatttatgagagaaaaacaatcccattagaaagtgggcaaaggacatgaacagacacttcaaaagaagacatacatgcatccaacaagcacatgaagaaaaactcattatcactgatcattagagaaatgatgcaaataaaaaccacaatgagataccatctcacaccagtaagaatggctattattaaaagtcaaaaaaataacagatgctggcaaggttgcagagaaaagggaatgcttgcacaccgtcggtgagagtgtaaattagttcagccattttggaaaacaatgtggtgattcctcaaagagctaaaaagagaactatcattcgacccagcagtcccattactgggtatacacccaaaggaatataaatcattctaccataaagacacatgcacatgaatgttcatggcagcactattcacaatagcaaagacatgaaatcaacctaagtgccctagattggatgaagaaaatgtggtacatatacaccatggaatacaatgtagccataaaaatgaatgagatcatgtcttgcaggaatatggatggagctgtattctaagcaaactaatgcagaaacagaaaaccaaacaccacatgttctcacttataagtgggagctaaatgatgagaacacatggacacaaagaggggaacaacaggccctgtggcttacttgagggtggagagggagaggagggaggggatcagaaaaaattaactattgggtactgagcttaggacctgggtaacaaaataatcaaaccccacaacacgaatcttcctatataacaaacctgcacacatactcctgaaactaaaagctaaaaaaaaagacattttgaagagcattttttaatgtagagagaagagattttatccaagaaaaagatgctgtaaaaaaggatcattccaagaaccaagataactatcagatgttaaaactatacaagtataaataaaaattgcaatagatggcttagaagatgaagttgaggatattgtccagaatacagaaagaaaaaaaaaaaaagaagaagaagaaggaaaagcaaagaaaaaaaaacaagaaaattgagttttggcttatgtaatccaaaagccaactaataggatttgttaaaaaaaaaaaaaaaaaaaaggccaggcttggtgcctcacacatgtaatctcagtacttcgggagacagaggtgggaggattgtttgagccgaggagtttgagatcagcctgggcaataaaaaactgtgtctctacaaaaatattaaaaatgtagccatgtgtatgtagtcccagctactcaggaggctgaggtgggaggattgcttgaacacaggaggcagaggttgcagtcagccttggctgcaccactacactccaacctggacaacacagtgagaccccgtgccaaagaaagaaaaaaatatacgagagaaaactgagaatatgttatcaaagaaatgatttaagaataatttctagaactgatgataacaaagttgtaaattgaaatagtaaccaaatagtcatgcagtataacttaaaaaaaaacctaaagtcattatgaaacctcaaaacactgaaattaaaagaaaaaaaaaaaaacttggccaagcatgaaggttcatgcttgtaaatgccaacactatgagaggctgagacaagaggatcgcctgagcccaagaatttgagagcagcctggataacatagcgagaccccccatctctgaaaaaataaataaataaataaaataaataaagtggggcatgtgcctatagtctcagctactcagaaggctgaggcaggaggatggattgattgagcccaggagctcaaggatgcagtgagctatgatcacatctctgcactccacactagatgacaaagcgaggccccatctcatttaaggaaaaaaagactaaacatttacaagataaaagcagacatatgtctcatataaaagataaggaatcagaatggcactggacttctcaatattgtgaagggaaatcagaagacaacacagccaacatctgtgaaattctgagggattgacaaagttagaaagataattcagtggagaaaggacaggcttttcaacaaatagtaccagaacaattagacattcacacggagcggggggaagaaaggaggacccttgacctatacctctcactatatgtaaaagtttactcaaaatggaacataaacctaaatgtaaaatataaaatcaaaaacaggaaaaaatctttgtggccttggactaggctaaaaattgttaaataagacacgtcttagtgtcatcatccataaaagtaaaaaactgatgttagacttcatcgaaattaaaatattttgctctgtaaaagatactggtaagagaataaaaagacaagccataggctgggaaaaaaaaattaaaaatcccagatctgacaaaatgcttatatttggatatataaagaactctcaaagcttaataacagctcaattttttaaacgggcaaaaaatttgagcaaacacattactaaagaagatgtacagaaagcaaataagaatatgaaaagatgttcaacatcattactcattaggggaatccaaattaaaatcacaataagacacaactgcacattttgttaggggagctaaaatttaaaacaaaggggaaaaaggaaaaaaaatgctaactgcaggtgaggacgtggaacaaattgaatcctcacctattgctcatgagtatgcaaaatggtacaaccattttgaaaaacagattgacagttccttatgaagtcaaatatacatttatcgtacagctcagaaatcttagtatttactgaaaagaaataaaaacttgcattgagacaaaaaccggtatgctgacatttacagtggatttattcataatcaccaaaaatccgaaacaatgcaaatgttattcaggttgtgggatatgatggggtttctcttccaataatctgatcaatcttttattctttaattcaccgtaccccaccaccctttttccttttcccagatgttaatttctttggagggctgaatctcttctgtatgtactagagtaatggatatatgattctacacatttgtctaaacccataaaactatatatgtgtaccaaaaggagggaaagttactccatgtcaattaaaaaaataattctgagaaaaaattatagcctaccagaactttatatccagccaaactgtcaatcaaatgtaaggataacataaaatgattatctgctaggcaagatatttaaattattttttaccttcaaatataacttttctcaggaagctcctatataccatgctctaatagaatgagaaagtaaaccccacacaaaaaaagaactcatgggacctagaaaaaggagagaggtagcaggaaattccaaaacaagtgatgtgtctgggatctaaagagaacacaggcgatattaaactaggaagctggaggcttctaggcatgtaaattcaaggagagaaaacaatgaaaccaatagatattctgaagaattcagacacaaggagatgagattaacacttttgagggggagttggaaacactttaaggaaaacaaaataataaagcaaggcaggtattatctctatgactggggaaatgaggaaagagatgtaatcacaatatgaggggacttcaaaaggaaacttgggaaggtttgtaagtgaggacgtacaaggaagcttccagagaactcagtagatagatgatatccaaatgaaatagaaaaggactagcagaatgcctattttatttggaaatgtagtattaaacgcagggggaaacagcagcaaaaggagctgagtctggttgcctcaggggggcagagaatgagaggggaagggctactgctgttcactcaaggctttgtagcatacattacttttaaaactgttctagacaagaactttttttcatcaaaaaataagaaaaaagagaatgaatgataccaaattattaacaacgattatttttggttattactgggtttatagataattttcattttattctttacaatttcctatatttcctcaattttctatcttaataatcaacagggagcagaatgagagagatacagacacagagagttattaagagcagaaaatacttctcccttctctttaatcaggcaaagcataatagatatccatgtcttattatgaagacagtctgcatttagaaagtggggatttcagggcacagagtaaaggtttctacgagatagcacgttgggaaggagactagctcagtgcctggcatgaaggaggagtttggatgatgcaaacccctctgtttgcccctggtctaatttttccattggtaagatgagggcttggggtcagccacctctccctagctctagaatttgactccaagaatctgtatccacctcagatgcctgtaatcaaggaacctgccaggaacaggttaccctagcctcctgctgcccaggcctaggtgccaggagcccctcctctccccgcctcccacatagggccaggcatgttcccaccccagaccctccatccactgcaatacattcctgggagtttctttgttctctcaactgcccacctcccaagagacaagtccctgaaaccaggtataaatggctgctgagacttcagtgccaccacctggtctgtgtacttccagctgttgaataaatggcaacccttggacatttctatttcctgcaaagccctcccagattagaagctgatcctcatgactccttacaagcttggcaatgcggaaccaagcagagtatttgaatatgaaaagaaaggccaggtctgtcttgaaattcaagtctctgaactctaagacctggacgcaggccaacacctggtttctagagctgcaagtcagaaatggcaacaaaacacaaggggatgagccgagctttggaaccaaacagccctgggtttgaatccttaatcggccactgaattcctggcactggctgagacacgttttggcagatttctcatccataaaactggaacaacaaggcctactttctatctaaaataattagcaaataattagatgacaataagtcgtgtttactgggcacttgctatgtaacggcactgtgctaagtattttatgttcactgttcatttaatcctcagaaattaactattacgtgctaccatccccatatcaaaaataaggaaattgaggtacagaaagattaatgtgtccagtgtggctcagcaaggaagcaccagagttgggatttgaaccccagcagtctgaggccagacttaactgccgcaccgcatggtttccctaatgacaggcacttcttgagggtggacagtaaccagccctgtctccttcttcctgcccatattatagatgggagaacaaggcccaaagcagggacgtgggcgtcccacagtcatacaggagctgggggtgggccctggattcagctccagttctttcctcatgccagcagccactggagcccacagaggcccatccggaggacccttggatccccactgtgagtgggcccagcaccttgctgcctcagacaacccacaacccctgacactcacaggtcccctcaccttgttctgatgtgggcatggtcttctgctgggaaagcaggtatctggcctccgccacccctcagcacacttaccaggctatcatcctattgtgacacctgccctagtccacacctcttgagagctcatcttttcctccaccatggtgaccaagagcaccacccatgccctgccatcaaagtggagggaaggaccaatctcgggcccctggatccagccaggtctgctgcagtccagtctgctcaaacagctcatgcctaccaaggcaagtgatttgtttccttggtagcatttaacactcactacattaacagtatgtatttattcagggaccatatctgagttatccattgctgggtcctcagagcctattccagtgcttagcaacgaagagtccagttgctacacgcagaacagagtacagaggccaaagggaaacaaaagtccagtgaagagtgactgccaggaaagagatgatggtatcctggtggcaaaggagaaaatagaataatttcagcagacatttaggaggaaaacgggataggattggggactgagggaaagaggggtcaaaggtggctcttggtgttcacatttgcaccctagacagatatccatctgtcctttcggagaagtaagagggaaaaaggaacactttttccaaactgggtggcagctttggagtaccaggccctcacgtaaactgttttgtttgtttgtttgttgagacggagtttcgctcttgttgaacaggttggagtgcagtagcatgatcttggctcactgcaacttctgcctcctgggttcaagcgattctcctgcctcagcctcccgagtagctgggattacaagtgcccaccaccacgccctgctgtttttgtatttttagtagagacagggtttcgccatgttggccaggcttgtcttgaactcatgtgatccatccgcctcagcctcccaaagtgttgggattacagatgtgagtcactgcgctcagcccaaaaactgttgataaaatgaaaccacagataaaaagccagtctgttgcctaaggacaaaccatattatgagcccttgcccctctgggtacccttttaatcagaggctccagactgagctagccaggctggaacggggatctgggaagctggagatttctttcctgagatcaatgaaacactggacattggaggaccagttggggatccctgtattgtatgggcttctgaccaaagggtctacaccatgaccttgctctgtgatcccaccattatcttgggatatctgggctgtaaccaatgggccgctggacagaggagaggatcagaagggttgggatataaaaacaaatcacatcccttccctgattttaaacctgatatgggtgcccacttctctgtggagggtatctccctcatggcagggaatccaaattccaatacaaattggtgacaatctccctttcccattttttcaccaatgtctagtgtagtggccatcattggctgcccgcccagccgtgtcccccgctcatccttcctaggggaacctctggggagtccttgccccctttatataggaacctgtgcttgggcttgggatgatgagacttgaggctcctacacctttggtccccagggttggtccaggaaacaggactcatgtatctcctatcactgcttgccattggctactttaagtatctatctcccctgctggactatgacctcctagaggccagggctcaatatgatccctttctgggctctgcaggagggatctgttgggcagaagaagggcacaggtgctggaggtaggctcttcttgcatacctcgtagggacttccatctcacacggcctccctggttgcccatcagcctttcccaccttgggcaggattctgatccatggctttctttagtctcagagcaaaaagctctctcaatgtcactctgaagctcgggcacacttactctgtgttcactctgttttttttttttttttaaagcgcccttcacatgatctagctctcaggcaaattggaaaaaaagaaaagaaaaagccttaattaaaggaaagtaaggcacagttttcatgcataataagaaatggctttttgagccagcatgataaaatcctaccactctggggttgccctccagaaagtgaggattaagaaagccagggttttatttaagggcagttggagaaataatggcagcaaactcttagaaagcactcactgtgtgccagatattcctacatgctttacaaataagggaaagcagcgattcccttgaatcctgctggccaaaagctgagaagagtgaagagaaaaacatgggtggagaaaaatgaccaaggacatcccaaggtatggcatagtctggagggtcgtgaaagccaactggtgctgttactactgggaactggatcccttgtttaagatctttaataagtggtactctaggttgtggtttgcaaatttgtttttaaatcacctgaagagctttaaaaattctaatagctggggtttacccgctgagatcctaatgaagttagactggggtgtagccaggacaatgagactttttagacaaaccccaggagatcccaacgccagtggaggttgtataccctggcctaatgttgtttactagtatattggtttcctcagctgccgtaacacagtaccacaaactgggtgacttaatgcagaaatttattgtttcatactattgggggccagaaacctgaaagcatggtgttggcaggaccatgttccctctgaaacctatagggaagaatctttccttgcctcctcctaacttctcgtggtttgctggtaatccctggcattacttggtttacagctgcgtgacccccatctctgcctgcgttgtcacgtttttctccatgtgtgtctgtgtcatctcagggtcaccttcttgcaaagatactgattggggccaacctactccagtatgacttaactaattacatctgcaatgacggtatttccaaataaggtcacaatctgaggtattggtatttaaggcttcaacacatcttttttgtttttttatttttattttcatttttttggtgtgtgacactgagtctcactctgttgtccaggctggagtgcaatggtgcgatcttggctcactgcaacctccgcctcctgggttcaagcaattctcctgcgtcagcctccctagtagctgggattacaggcatgcaccaccaagctcagctaatttttgtaattttagtagagacggggtttcaccatgttggccaggctggtctcaaactcttgacctcaagtgatctgcccatcttggcctcccaaagtgctgggattacaggcacgagccaccatgtccagccatcacatcttttttagagagacacaattcaactcacaacaatgggtataaatgcctgttcctgcaacccctcagctttgacctgtggactctgcctgcccattgcctgaatgccatactcacagcatgagttgctacttggagcccagcatccccacatatttgggagatccctagtggccttcctgctcaagaagcctctacctttctccttattgttcatggagtccttcgtgctacttgactcaaagccttttgccttggctcacttggcctttggcttctgagtcttcaacaccaggctccttggcaaggctactgacagcctgctaaatttcccaagcacccttgccatgagaggtatgctacaccctgtcccctcaaaaccccactgctagctggggctcagccacaaagcagatatcccaccccatccagctgcaggtttggtacttgcctcctcttaggtagcatcagagctccgacattccactcaccaggaacaaggcccactaatgagtcaaagctcctttaaaatctgcatttgtctggaccttgctgtgctattacacagctgaacatccttgggcaaatcacttaacctctctgaagctctgtttccccacctttaaaacacagatgataatccatgccctcatttctgatcacaacactcaggacaaacacagctcagaattcagaacagtttgggtttttagacaagtaatatgggcccataaaacagtcctagtgagatctggggcaacattctgggctcagacacacaaatatttccacagtgaggcatatcaaaattcataccatgggagacaaaggctacagatagcttcataacagtttgcgtcaggtttgacagccaaatgaatttagtgttaaatacacacacacacacacacacacacacacacacacacacacacacacacataatctctctctccattttcataacttcttgaatttctggactatatgtacgagaatgtcaacctaagtctagttcacaagtttgtggtaactattacaagagatatatcacacatgtgggtatcttgcagaatagctagtttgaagtaattaagtatttgtgaatctggaaaaggaaaaaagcttcaatctagctgaagccaaagtttgccactctccttaaaacactgcaatttggccagaaggcctgtgacttgtgcattataagtggtaaaatgtccccagctttgccctgctccccacttcatcatcagtcccaaactgaggtctcagcatgtgacaggaaccacgttcattctaatcatcacagtaatttttaaaaaaaattccagctccattccacatctcttaagttttggcataaatcattgttacaagaagaccttctcttagaaagatctttagaatcagaaaactcctgtattctccaacagcagcctggtttcatggaatgcagccagactcaggttcacaggtcttcctcctcaggttggaagtggtttttatggtggctgcactgcgaacatccccaaagctccaggagacatgcaaaacgaagaagagtgcagtgtctacaaatcagcagccagtgctacaagggagctgagtagctacactctgtcaggccagggttggaaaatccattgtcttcttcacttcagactgctataacaaaatgccttagactgtttatttatttttatttttattatgttttttgagacagtcttgctctgtcactcaggctatagagcattggcacaatctcagctcactgcaacctctgccccccagattcaagcaattctcctgcctccgccccccgagtagctgggattacagaagtgcaccaccatgcccaacaaatttttgtatttttagtagagatggggtttcaccatgttggctagtatggtcttgaactcctgacctcaagtaatctgcccactttcgcctctaaaagtgctggtattacaggcatgagccactgagcctggcctaaatttattgatcatagttcttgaggctgaaaagtcaaagatcaaggtggtggcaggttccatgtctgatgaaggcctcttcttcatgcatggcagcttctatgtgccctcacgtagcagcaggaacagagggggtccctcaagcctcttttataaggacacaaatcccattcacaagggctccaccctcatgacttaatcacctcctaaaagccccgcttcttaaaattatcacattggggattcggtggcaacatacgaatttggaagagggagatacgaacacctagaccacagaacccatctagtcaggcctagtatgaccttggataagctaattcacttccgggatccctaaatcttcacctgctaaataagcatgtggattatattcccttccaaggaacttctggcttaaaaactccacaattaagatttctgcctgtctgagataaatgttggttccctaaagagatttggaaaataaactatagctattaatagcttccgatagacaatttcaggcaggaggtaaagaagcaattacacagtgcacatctcatgccacacccggccttcgtatgctgatggattcaggtacagtgtggttctgcagttcccttggggaattttgtttctcaaagccagggactgactgctcccaccacggcctctgctgggcagctgctactaggcaggaacctgtcagaaatcaacccaagcaatgacttcttttgggaaacagagtctccagaatttgaggtaattcaggtaaatgtggcagatggtagcatctcaaattgtcatttctccaaagaaacctggcaagggtgataacctctggtggcctgaatttagagttgagcaatagtaagaatatggcaggtgtaataggttgctattgaggggagcagaaagatttggggcagagcactccctcaggtatacaaagaacaggggccatgcccatggttgtagctttggctccaaggaggaaagtaagcatggagggcttccaaattggactaaagccatctctggctgaattctgggtgccacattctaatgagagggaattaaggggtaagacttgacctcatgtcatctctttacagtgaccttaaaaagcacatcaccttccttaggagtaaaattctattagtagaaccagccaggaaaaaataatgcatgcgagtgtgttgcatggaaaatctcagaaacttggccaagaaaactgaaagatcaagaacctgagtaaaattcatcgtaacaatagaagataatgagaaaaaacacaaaacttcaaaataaagtagttaagtgtatgtattgaggacatgggaacaacatttacgcaggtgagcatcagagaaggaaaggcctgttttttgaatgccaactatgtgccaggcactgtgctaggcactttccattcattatttcacttcactcccataaaatacatatgaagtagcattggcggtcattgcagtcacagtaataataggaaagcaccagtaattagaaatcatagtgtttttcaaatctttttgtgatgaaaacataccccgggttcagggaggcaagcctaccaaattcaaaaggcatgaagagaaaaatgagaactcctataaactcatctttagatatgagcctgatgccaaagctcccaccgccatagcatccacattaccatcagaattaaggggtcctttctatgagagtcatagtccttgctcaggtgatttcattggtttccaggaccaggatttcagaaatgacaatggatttttttttcttcatggtccagaaagtcttggtcaaaaaaacaatttggttactcacagtgacagaaggcccctggctggggctctcagagggaatccatgctgaccactccccatgacttcccccacatgacaatgggctaagtggggctctcatgcttcccttctgacccctctcccctctcctgactcaccaaaaatacaaagtccttgggtaccttcaacatatctagaatcagcttcacactgctctggcgtttgttcattcatcagttcgagcccctgttttgggtcagaccccatgctaggagatgggcgtacggggatttggcaagctgcctagtctggaggaaacccatggtccctgcctgccattccatgactctctatcccacccacctgttcaggttcattctcccagcaccttctgccaatgtgacaatagagtttgcggtctccaagaaccagccctctgggagtggctagtgctttgcttgacggggaccatcagattcagctctcatcccttgttactatgaaggtaaggatgaagatgcccctgtgggagaagggggctgcctaagaccaaagtgtctagacattggtaagcaagcagcccacccctcccttgcctgagtgtgtgaatgtactcaggatcctcggagcagtcagaccagtgccttgctcgatgtccactgttgtttctgtttcgggtgttcttgcccctcagaggtccagactggggaaagctaaagggctgtcttgtgtggtaatggccaagtcacttctcctggatctcaactgccttctctgtaaaatgggagtgttatattggttggtgatccaaggtcatcttttccatatatgcaggtttatgattttatataaacctgtttctcatcctaaatcataattataatcataaattgaagggcgtgcatgtgtttctgtgtgtgcacatgtgtgtgacagagtgtgtggtctgagaaaaatctgactctgagttttctacgaatgctccagagagtacttaaaaaagtctggaatcctggactctccttgttgagagggcacacacctgctatacccacgtgggtcacacagcccacctgctgcacaagcaatggaggaagggcatggcagagaactccctgggtatgagctggatgcaggagtccaagacaggcatgaacagagctctgtgatctggtctggagaaatgggacatgtatggagcacttggttaagggcaagcgagattatcccagaacacctcaggaaatcagagatagcacaagcttctgagaaatgatggcagagaagaactgggcaggtaaagaatcagacctccagctggtccagggctcagggttaaacccaggggtgccctcaaagaacagacaaaatccttgttctcagtcatgagacagccacacctacttggcccagcataggtctattaaagacagaacttgcaggggtctgcaagggaagctgagcatcctgcagcccccagggacgctacaaggcagctgagggcctcaaaaccttaccaccatcacgcccaccacccaccagcctccgtgtgtcacccagaaccatggatgccctcacttgctgcctgctcacttctcctactttgataaggtcactcgccatgctttataacgcaaaaataatattcctgctgccattgcaaattatgtctgaactatccacccttcccatcctcatgcagaaagcagctctgcaggggagaggcatgccgggctgcagttacaaggcttattaagacacctaatggaacaccttgtggtgaccgccccctctgaggagagctcagcaaaatgcatcacagaagcagatgtcaggcttaaggcaaaagcttccaaagcactaaagccatacatggaaggactgagactggccccatctgtaccagatgttcgccatggctgtggtgctggggctcctcacccttcataagcaaactaccacagtaatgatctcacattcttggcttctaggggctgcaagaagaggcactcttgcttaatacaaagcttgggacaatggctacaggcatttggtgagcctcaaacaccataggggataaagttttaatttaagtgaatgagttgcaagcccagctgtctggggaatgacctctttagggttctcttcgctgcccctcaggagctctggtttcccatgtggctagttggctcctaccttctgaagtggggagctctggaaagttgagataaggactgggcctggggacagaggttccaagaaggctacagagcctgattttttcctttgttttcctgtgtcttaggtctccctcgaaaagaatcaatggaagtaggtaccctagtgctgtggtagaaaatgtgcaggaacaagccagatgcaaactctgtctctactccttacaaacaatgagactctggagaaaacaatggggccattctatgcctgtgttttctcattttaaaaatgagggtggtgataataacagtctccttgtcctccagtttttatgaagatcaaattagttaatgcctagagaatcaatcagggtcaccctgggcatgttcgaatgaggagaatccaaggcaagttaacaaagggaatatttacaaaggtacaaagcgggcaaggacaagggtaagtgtagcagagcacccacggggatggaagggattaggggaggaagtcgttaacagaagccagcaggagagaacaggggcgagaagatccccttgagaggaacagcaaccttcagtcaagacacacggctggcccatagcaaccacacagggaaggcccagggaataagtacacagaacactcttactccccgcccccctctgatttctggccatacagaagaccaagggcattggcagagcctatacaggccagcctttcagggcagtgagcagggtggaggtgggtaaagatggattgaaagggtcgcgtgaacaccactagcacagctctcaatctgcccaggaagtaagcactcaaggcacgagatgttgctccatccatgggcatcaacttggatatacatgttcagccctcatcactgggacactaaatggggctttagagtcacatgccacagccatcaatgtctctcacagacctgtagctgccacagttgagtgatctgctggctgaagggaaggccacccacaggtgacactcccaggacttccctgggcctaccatgttcaccttgagactgtttagactttgcatcaatgacagggcaagaggcagtgatgtttccatcctgttagaaaacagaggtctttaaaaaattttttccataggtttttggaaaacaggtggtatttgggtacatgactaagttatatagtggtgatttctgagagtttggtgtacccatcaccctagcagtatacaccgtacccaatttgtagtattttatccctcacccccctcccaccctttccccgagtccccaaagtcattgtgtcattcttatgcctttgcatcctcagagcttagctcccacttatgagggagaatatatgatgtttggttttccactcctgagttccttcacttaggataatggtctccaattccatctaggtcactgcaaatgccattattttgttcctttttatggctgggtaatattccatggcatatacatgccataatttcttcatccacttgttgattgatggagtttagggctggtttcctatttttggaattacaaattgtgctgcatgtgtgtgcaagtatcttttttgtataatcacttcttttcctttgggtagatacccagtagtgggattgctggatcaaatggttgttcttttagctctttaaggaacctccacactgttttgtatagtggttgtactagtttacattcccaccagcagtgtaaagtgttcccttttcaccacatccccaccaacatctattattttttgattttctgattatggccattcttgcaggaggagtaaagtggtaacacactgtggttttgatttgcatttcccttatcattagtgatgttgagcattttttcatatgtttgttggccatttgtatatcttcttttgagaattgtctattcatgttcttagcccactttttgttgggatttttttttctaatttgagttcctcgtagattctggatattggtcctttgttggatgtatagatggcaaaatttctctcccattttgtggactgtctgtttattctgctgattgtttctttggctgttcggaagcttttcagtttaattaagtcccatctatttatctttgtttttgtcgaatttgcttttgggttcttggtcatgaagtctttgcttaagccaatgtctagaagggttttttccgatgttatcttctagaatttttatggtttctgatgttagatttaagtccttgttccattgtgagttgatttttgtataaggtgagagatgaggatccagtttcattctcctacatgtggcttgccagttatcccagcaccatttgttgaatagggtgtcctttccccactttatgtttttgtttgctttgttgaagatcaggctgtaagtatttgggcttatttctgagttctctattctgttccactggtctatgtgcctgtttttataccagtacccatgctgaggaaacaggggtctttctgacagccaaggggtaagtggaatttgctaagtgaaagaggtccattttaggaagtcccactttctcttaaatgacaaccagcctcctcctaagtctttcccacttgctctaggcctgaattcagagttccattgttctttcacagaactccttggagtgacaatcaactaaattaaatcaattaatccaacatttacagaaagtcaggcatgtactgcttctggggaaagtggaaacagatcagatgcaggcactgtccagtggtttctttttcccaagaggacaattttgaaactccctcctcacatgcccctagggtagccaaaacccatagaggttcattctccaagatagggtggtacagtgggcagagcatcagccctgggggccacaacacactctgttagaacccagctccattattattacatcatcttggggaaaagtcacttagactccatgaaccttgttttcctcctctgaatctttcagagaataatctctaactcacacgatcactctagggattacatgagacgatgtgtgtgaattttctagaacagcacccaacacacagtaagtcctcaataaatgttagctcttcacccctacaagaactccaggtctccagatgcctatgtctacccctttaaatctcagacttagaggaagttaatcctgctgtttctgtttcctacaacttgggctgtgctaccttgtcccatttccttctgggtccaggtttcatcacctattaaatggaaggacacagattacacaatggataagccaaggggttctcaactttccctatgactacatttctccctgggctgcatgttatgaaaggcttgtccactgcataaactgaatttgtgaaggactacctcttcctccattttctcctaatcaaagcaagttccccccttcaggtttctgagcagcatgagatcacagctttgttcaccgggttgaatttgaaacctaacccaaagaacttgagatttctttgaacctgtatagtgtaggcacaggcatcttgaaatactaaaagcgcttcaagcactaccacttctccttcccagattcccaggtcctcaagttgaaaagcactggactaattgattcttctgaagccctccaattactaactctgtcattttaacgtccgaaccggaataactaaggaaaatcaggcccaacctgaaaaggcatttgttaacatgagatggactgtggctcattatggcaagggctggatatgtaaggatggaggcattttatttatgttaggagactgggccattaaccagtgttgtgaatgtgccttctacaggcgagtcttttggcatcccccagtggtaggcagtcagtcctttttgttcagttgctatacacccactgcactgcagtgtcaaccccaaaggcagtggcacttacacattcctttgtgaggccagctgctggtttaacccatggccaggcctggtcctttttctccaagcaacagggaaggtgcttagaggcccatgggcttatctgcaaagctattttcctggagctcactttggagcatcccctcctgaccatggtagtgatttgagatcaggtgtcttcaaagagcagcccttggaccagtctacctcctgacgccctttcttctcatcagatggaaaactcacagatgggaaaaaacaagctgattacccgggtctcactccccacagacatcttccatctttggtcctcattagggctcttggtagctggctcgttgctaagtcaaacttgcaaggcacagtttttctgccacttctttagatctgcacttaattacagctgttccttcctgttggccattctccactgtttcaaacatccaagatactagtcttctaatgttcttatcctctcattagagttgaacattttgttcttgtcttacatctattctgttccctgcacagctcaagaagtacttgagtttttgcctctgcttttatgttgcataataaatagcattctgcctggtgtgacactgagaataactgagttactactttctatcaaaagtatctaaagatccatgaagactcacaaggctcctttctgctgttaaaagactgtgcttttaacaacgctgatttctattattcttaactttattaactctaatcttactcaactctaatcatcactgtcttgcatttctccctttccaatccaattcttgatccattataggcatctataattataatacctccctgcctacctggggtattccttttactctcaaaaatgtccctattgaaacaaaaataaatatgtcaccccaaccatagagaataagatgtttcctgtttatttgctattgcttcagctcaagttcctgctctccatgtgtcaaagcaggggtcagcaaatatttttcgtaaagagctagatagtaaatacttttggctttgcaaccatatcgtctcttttgcaactactcagttctgccatggtggtgcaacagcagccgcaagcaatacgtaaatgaatgggtgtggctatgtttcaatacatttaatttacaaaacaagcagcaaaccagatttggcctgtacaccatagtttgcaatctatgcttatgtacggactgagataatgatctgcctttccctctaaaaagctgattttcctaacagcattaattatataatctattatttcccaaaacgatttaagtctaccattatcacatagtaagtatttacatagacacaaatcattttcattatcttattttgtattctgtttcaattacattttatttcactagccactaaattgcttatagtattaagttattttataactctctgtaactttttgctgtgcaaatctcccttctattaagggacaaaatgtcccttttgccattcttatgcatttcatcttctatccaaactttacaatcatttttgtcaagttttaaaaacataaatatgtaatcactttgggggagaattgacatatttatatgaatacacgtttccattcagaaacatgatatttttccaagtattcaagtcttcttttatgtgcctctgtgttaaagttttcatgttgttcctgcattttttttatcttcatcccaagctttaaaagatattctgtcctgttatgattgggtttttctttgctctatatattacaatttaaaaactgcacatagaaaaaacctgctaatttttttttagaaatttatttcgtatctggtccctaaaacctcttgctaatgccaatgggttcttctttgatgcctccttcatatatttttttagaatactaatcacacttgttcagagggctatgtcctttgattttcagagccagagtattttttcttttccatcagtttgaggatttttctccactggctcatcctagagatacagccttcattcatggattctgttccccaccaagcccagcctagatacctcctctatttcacaaaccctctcatctgacctatcaacatgccttctagttagtgaggcttgtactaattttacagtgcttgggtgcagaagagaacagactgagaggtaggtggggctgcagaaacccactgggaaacctagacctccctagagagtgaacacaagttcactcagagtggccaagagaatatgacaaatgcaggttccacccaggttgctagcatacttgaggagtcaaagatggtggtggagctgcccagcaaagatgttcaagtgaaggcatcaggagatggggatgctgagagtcagaagctagatgatgaagcaacagctttgctgcatttcaggataagagcaaagaagctaaatctcaggcaccctttggtctgatatatctacattaactcagcattgtcagtgccttttagctcatgtggcttggccctgagtattttggtctcattcaggaatcaccatcttaatcaagaaaactaagcagaagcctcatatgaagaactttgtattagttaaggttctccagagaaatagaaccgacagaatatataaagatatataagaggagacttatggaaattggctcatgcaattatggaggccaggaagtcccccagtatgctgtctgcaagctggagaatcaggaaagccagtggtataatttagttcaagtcctaaagcctgagaactagaagaggtgatggctgatggtataactctcagtctgaggccaaagtcctgagaacccaggatgagaaggtgtaagtctggaagtctgatagcccaacaaccagaagctccaatgcccatgcataggagaagagtcctagctcaagaaaagagagaaaaaatgaactcctctgcccttttgttctattctggtgctcgaacgattggattaagcttgcccacattggtagacttctttactaagtcttctgattcaaatgctaatctcatctagaaacaccctcacaggcacacccaaaattaatgttttaccagatatctgagcatcccttagaccaatcaatttaacactcagaattaaccatcacaaccttgtatacgttttcctcagaatgactgcatgccaggattgcgccagcaggctgactttaatcactactatcttgagagatgggctcctaaaatacagcaaagttgagctggatctgaatagactaaccccgtggctgagcaaatctgggcaggaccagatggaaaatgggctaattctgtaccacccattatcaaatcacatatatgtctagatctgtgtcaacaaatcctttccaacccaccaaatcaaatcattggagtagaactggggagacctgcagtaccattacggctcacaatacctcgtcacaacatgactctggatctccttatacccagagtgtttctgtctggagagtaggatgtaatggtgacattccatcttcctttccatacgtacccatttgtttccttttatttgttcattcattcgttcatttggcaaatacttaccaagcctactgtctggcaggcaccttactaggtactgaaaatagagacaggaataaggaactctatccttgaagcacacatcctattcacgcatggtttaaggaggccaagacatagcaagtttgaacaccttgacaaaggaaagaaactagggaggtacaaccagagtttaatcaaggactgtttaacttaccacacctgctatcactcagaattctcacaggaagcttccctaggcacactgtgacagaatgggtgggggaaactcttcctaacaccacctgacatgtgccttgcacccaccacaggcatggtaccttgaagcagagtaacagaccagtcagatgatcacatctccctcacctatagagactcatgatgatgtcttactgcctaggaaacagtacagtagctaaagcaatcactgggggaaaaaattctgaaatctctaagcattgctcattagcataaagcttggagaggtctgataaagttcatggcttatctccaagcctgcttgcttcctctctgcccagagcagcagctgggcaagggattgccttctttgcaaagaagcaaattaaattaaattagatcagttataccagcaccaccaacagcagaagcatcttcaataaaattaagatctcgaaatgaaaacaaggaaatcatcttctaaaaacctaatcccattgcccagtttgaaggcgctcactactgagacctcctgtggcaactttacatgaacatttgggagcagggaactaggggagacctggcagcatcgttgggtaacccaggatctgggccttttgtttgttgttgttttagtcttagggaagcacatatccaatcacacacttgatatataaataggccatttcagtgaatacagtcattggaaaccttttccaataagagcatgtcatactggctatgaaagagtgtatttataatcacacagcatggtatagtggaaagaatgccaggtattccagaaaatatggtggtttgcacaccatttcacagaacctccatcttcaaagttgactgaaatgaacaaaatgaattaaaatgaacaacaaaaatattattaattctgaaactcagaaactgccccaacctcatgctataggttttaagtgccacctgggccaaaatgaaagaagagtaatctatgttcatgcttttttttttttttttttttttggagacagagtctcactccacccaggctggagtgctgtggtacaatctcggctcactgcaacctccacctcctgggttcaagggattctcatgcctcagcctcccaagtagctgggatcacaggagtgcgccaccacacccagctgatttttgtatttttagtagagacatggtttcgccatgttggccaggcttgtctagaactcttgacctcaagcaatctgaccacctcagcctcccaaagtgctggtattacaggcatgagccatcgaacccagcccatcctccctttcaagatggaaaagtactgttggcaaggaaaaaaaaaatgtgtaatggacagaaaagctgaatgatatagctcctaatttgaagagaacaaattggaaaggtgtgaatattccacttggagctcgtttttcccattttggattgactccttccctaaatcccttcccagagccattctgggaattatcaggcagaaaccagttatctcatatgaggactcaaatgggcaaagacaagaaaatgaatgggtttagaaaaacaaacgacaaaagtccatgaaacagaaggacctctcattaaagcagctgactcattttgaaacaggtgagcaaactgaagctttaggggaccacccaccccaggaagaggatcaactgacaattcaatagacctaaatctagtgtcagaatttcaataaatttagagacagattagagacaaagcccccagaggctttttgcaagtcctcagcaatttcctctcccataagagagcagtcaaactgtaaccaagtaaattgggaaaatagcaaaggcaaattcagcattaccaatttggatcaaataacaccatcaggtaactgcccccactgatatagtggtcaagtagagggggaaaagtacaagacttaaaggaagattgtgtgtcccccacagtaggtttcacacgcaaagatttttttttaaaactcaccctggaagaagagatgctccaggaaacataaatagatcactgctttgtaatcccaggaaaattaaagagaatttaagctctacgaaacaagcaattaaagggtgagaaaacatgacagttgttcaagaccgggagtgtatcagcttctcgacaacacccccaggttcccccagggttgtcttctgggcaacctcccaggtactgtcctctcatcaatactagatccgctgcagttcctgaacatgtgacggcacagtatgtaaaaatgcatatactattagggctggaggaccctcatctagtcatcgtcaatgacaggacaataaaaaccaagttcacgtatttattaagtggcaaagctatagcttagaccccaacctgaccctacatgtataaagaggaaagaagagggatgaagataggatgttgggagggaaaaaggaggagaaaaaagggagagaaaatggaagatggaagcaacagctggggtgcagtaaaaaggggcactggactagccagaaaacctaccatgaatcaaatctgagtacatgccttcaatttctggggctacatgcccaacaaacagaattgttgggtcacatagtcacttgatgtttaaattttgagaaattgccaactgttttccacattagctgcaccatttggcattcccatcggcaatgtacaaggttctaatctcttagctctagcactcactatgttgcatgactctgaaaaagtcattttatttatctgaacctcactttctttttctctaaagagtaggggttagaactagctatcctgtttctgcctattcacacattctttctttccatccaaatcctgaccttccactgcccacatctgtttccaagagtttcctgacagtgtgaagtactgtaatgagtaagtcctagctctgctccttagagctagaattatcttaatccatatccccaagttatattaatgcacttccatttccatccatatctctcagcgtacattttttctctcttgtctattcttttaacctttttgcaagcatcatcttgttctgtctgtcggctgtcagcttttctctccgagcttctgcggagttgccagattcttgactatttccccaccctcagctcataactgtttttccctggagctcagcgactgctaagtggtctttgtgaaatcctattaggataatctccctgtctgtgtctcctctcagctgggctgcctctagaaacctcagctgtcttcctactcacaatcggcaaatcataggctggctcctgagtcatccaacatcgtacttattcacaaacatgcttagatgagctctgaacctgtcgaatcttgtagcccacaagcaagagttaaattcactggagattcaactcatatgtcttctcctgcagaaggtgtctcctgtttatgcgggacccctattccctctacaatcccaggaatgacacctgccccctttttactttttctgtttctgtttatgtttatcatctatctctctcatcagactgtgagattcatgagagcaaggagctggagtatcttgtccaaagctgtatcctcagtgcctggcatattacaggccctcagtacatgtttgttgaattcatgaatacgtgttcctcttccatagagtcaatcatggatctgcctacctgtctacctattagacccaaagctactttggggcagactgagatttacctgccatggtaacacttgttaaaaataaaattactctgacacttgttaaaatggtaaggaagacattattcaagattattgcaatggaggagagaaattaggcaaatataacaaagacagctggggatttagagccaaggaacagagtgagtggatgaaaaattaccaagaggagacaagggtagggagattcttgctaaaacaacttaccagggttcttaccgaaggcaggccaggatgatcagatagtgctatcatccgaatgtttgtggaggccaaaactcgtatgttgaaacgctaaccgccaaggtgatggtattaagcgatgaggactttggggagatgaattaggtcatgaaggaatgggattagtgtccttataaaagggaccccagagagctgccttgcctcttccatcacatgaggacacaactagaaggtgtcattttttaatgaagagagatctcacgagatatggaatcttctagcaccttgatcttcaacttcccagcctctacaactgtgagcaataaatttctgttgctaagaattagtttatggtacttttttatagaagcccaactggactgacagatgtcaaggggttgggggatcctcagtaggctaacctagcagagttcttgctaaaactgggctagacaggccacagacaagatagccaaaatcaaagcctagttgagaagggaattcagaggagcatgactaaaatttggtcaaggggagagtctttgtcaccccagcacctagcacaagtggttggtactaaatacttactgagcccagctgagcacccaccctcagtgcagccctgcttaccctgacaaaggtttagggctcttactctctcctttgtgcctcaatgagctgcagcgtcaggagaagggactccagtagatagcgttcaagtggctgggggtggggaagagaagcaaaatgtgacaaccccacattaatcaagaaggtacaccattttctcagggtttcataactccaatgatttcctgggccaatcatcccaaatgaccctcacagccactttgtgaagcaagttgatttatcttctcatgttatgaacggaataactgacactctgggaggtcaagcaccatgtcataggtcacacacccagaatttcatgaagtcatgaagacataaagtgtacatttatctgctcagaaactttttaagttgttgtccctaaatattgtaccaacttgtacttataccaacagtgtatggccacctggttgccagaggtctcaccaacactgatgtgtgtctgccggattatttttccttttactgatttttaaaacctctttacatgttaattatatcaatcattttttgcacatataatgcacatatctgagctcagtttgtttatttttttttttaatttttttttttttttgagatggagtctcgctctgtcacccaggctggagtgcagtggcacgatcttggctcactgcaagctccgcctcccaggttcacaccattctcctgcctcagcctcccgagcagctgggactacaggcacctggcaccatggccggctaatttttttttttttgtatttttttagtagagacggggtttcactgtgttagccagaatcgtctctatctcctgacctcgtgatccacccgcctgggcctcctaaagtgctgggattacaggcatgagccaccgtgcccagccagtttgatatggatattttcatgatgtttaggttcttagggacaaagatataatatttttctttatggctgtaccttcaatggtatcatcagaaaactgtcctgctccccaaaattaaatatttatttattctttaaatgtcatctatgttttccaaattttacatttaactgaaatgcactgcatttatccagaatatattttggtacatagtatgaagaacccacatcctcccctggtggattatcatttcatcttgacctgtctcattaattagaaatgtgaagtttgtctataacatgtacacatgcatgcattcacacacacacaaacacacacacacccctctgttttaaggacatactttattctgttaatctatctgtctcttctaagattggtataagctatttgaactattttagtttcaggatatatttctaaaacttggaagtagaagtctttctccatcattctcttttcaacatttgcttgatgatctgtgcccatttatttttccagataaaccttaaaatcattttataacattgcttatacatttctattgcaatatgcattcaatattttaaattgacagctttaaaataccaagccttcccatccagaaatgaaatacctccgtttacttatttgttttcccagttttgctttatagattccttctacagttcctgcaaattgtctcttaagccaattcctcaggcttttatatttgttgcttttacagaatgaatccttttatattatgtttcctaactggtgattggtatttagaaaatttttcatttttgtatatttattccctaactagtcaccttattagactcttttattgggctctaatagtttttcattatttctcttggggttttggtagataataaaatcctctgcaaataataactttatgccataattatatttcccattctgttactagaaatccctgaataaatgttaaataattttagtggtcctgagcatccttatatttttaggatatcagttgttagtttggaatagacaggctccgtcacattaaggaaatagctttctaggtcttttaaggatgacgattattctctgttcctccatcaccactttcacccaccaacctagacatagtggtctgtagtctgtatctcccaggcttccttactctctgcttctagctgagtttaaccaatggcagagtttggccatggacagaagaccagggggtggctgtgttcctctatagcctgtcaagcaatcccttaacactttagcaccatttctatttcctaccattgcccttcagacccagggtggtaatggcttcccaaagttgccagtccctgggtgcttcactatcccttgttaattcccttgattctgatccaatctctatttcattaaaccccatttaaatcattcatctctcacatgcttcttgcctagacattccctaactgattgataaattaagacccagtgggaagtattttcaaatgtatttttcaacatctcaaaataatcaaaatatttttttcttttgtgaaattaacgtgacacttattcattcattcatttaagaaaaaaaattctgagtacctactatgtgttgcttgttgtgctagacactgagatcagaacacattaaaaaaaactaaataaaacaaaacagataagccttctgcccttatgttctcttagggaaaacagttacacaaacatgtagatgaataaaatgccaaatattatgataaggactagaaagagtgtctggataaaacaaaacaaaacaaaacaaaacaaaaaacagggagtacatattcaaaaaggctagtcagagaatactgctcacagaaggtgacatttgagttgagttgacatgcaagctcttgctgagaagagccttcggcaagtgaaaagccttgagacaggagagagcctggtgtggttaaaaaaaaacaaaaaaccaaaaaaaaacagaccagggtatcaccagcaagggggaatgtggcagaggatgtgaataaagagataggcagctgctagatcagcactgtccaacagaaatacaatgcaggccacatttatacttttaaattttctacctgccatattgcaaaaggttatacacacgcacacacacacacacaagacactatcttttcaacatataaacaatataaaaattaacacaacattttacccttttttttggtacaaagacttgaagatctggtgtattttgcatttagagtacatctcagtttgaactggccacatttcaagtgctggaggccactgtattgaaccactcaaggctacatggtgcacatcaggcctggctcacaaggcctcccttggttgagaggggcaagatatctgagactcatctctatagctcccagcatcatgcctggcacatggtaggtgttcagcaaatgtttgccacacaggatggcagaagaactgcaaaatagatggcaagttcctgaagcagagaggctgcaccaggatcactctggtgcctgctccaggaaattgggtctattgtgtgtcctcaagcaagagaggaagttggggtccacctgctgagtctcccactgtgggggctgttcatgaccacctctcccatagccagggtgcttggcaaagctgctttcttaattcagaaagatcacatcacaccatatgccagagagtgggagggagggagcccattagcattcattgtacacagcttttcgtttggaaaagcacctcgaatgtgccgatctgcattgctttgcttcatttttcaacattcatgagtgtaattgcatttatttttctcgtcaagactgcaaaacaagtgataatttactacattacagcccatatcggctgggtttacagccacaacagttataatccaccctcttagggactgggtgggtaagcagggggtggtctttttagctgagagcactgtatttctttataacaggaagcttgggcccagctgttcttcaaggttacaataatagtggcaaaaactaacccatacagagacactgagctgtcaaagcatatgcacttctactatcttgatggcttcttacactaatggggtaaggcagacttgtactcccattcacacttgccagagaaagagactgagattcagagaagtcctctgtagtagatggtaacaggttggtgaacagcagagccagggttcaaacctagattcatgtgataggaaatcccgtgctctcctcatgatgacacctggcagtgcctgagctctagcaaagcgtgaggtcttgtagttatattggtagaaaagaagaggacatgatcttaaaattttgtaaatgtgaatgaagtgcctacagcagctgtgaccacgaaggacacctattttcttgcatctacaccacagaatgctaacttccagcagagaatcaggacaggagactacatccctgcctgaggtccatccaggtgctactctgtttgtgactatctagaaatgagagcagggaaggatggtctagccttgtatttggagatcattcaatgcagatgttttcttcctctttagaacaagagtcaagccatagtgatgttcagactttagatcacaaatgctcacgaattcatgagtagtaactgatgaacaagatccaaccctaaaaacttatggattcattaaaatcatttcctaagtaagattaaagtagtggacatgtcagtggtcgtgagctcctcatttcttcttcctgggttttagagggatgtaaactccatcccctaacctgactccctgccccctaattacaacacacggatcttgaaaagggtggacttgaaagctggtcttgctgtaaaggatctgaggaaagtgggcagaccatgaaaagccccagatctcagtcagaggatattgctaccatatgatgtgacatctctttcaagaggagatgaccctggggtccagccccacctctgcagctttctccaaggcaggaaagagataccaggggtccctgtaaagtctgaagagtcaggagctgacaggtgttcaggaagtcgctccagctacctggccaggatgctgtagtctgcaaaggacccttcagccctgttcctgtcccttttctgcaaactgaggtcccctctctcaatcaagtgatggctctcctctatccactcctgacattggcaagtgagaccctgtgtgggcgtttctgccccaggccaggactaaaatgacaaggtctggccactccagggccttctgctgagtctcagtaagcacacactggacaaagaacctccagcagccactcaatataaggggcctcaggtcttcaaagaaggccagtaggcgatgatgaacattacagcccacctagtgttaaacacatgtaatcacacacacagagagaggaggggagaggggagagaggagagggatggcaggcctaacaagtcctcagggttttccatcagtacacaggttaccaaggcacctccatgctgagtcccagctctgagacaggacaagaagaagctgcttgatggtgatggaggagacccaacatgggtccacgcaccaaacattttgttctgtgtgttctcaaatgtttgtcattcaatccctatgtgtcccaattgcatgaccttcattttataagtaagagaaaaccttgagccatagagaaactttgctcaatagctttgctcaaggtcccccacactagtccctctggctatagtgtccctgaaccttgaacgtgtatatgcctctggaatctcttttctgaaattcaactgtacagagaatcaaagaccaaggttatcaaagttttatttcaaacacaggaaagtagtctttcaattcaggcaataacctttctgttattattttccatattgcaaagtctaaaaacttagcacaaatctaaaaatcaggcttgtaaaggtgacattttgtttgaaatggtcaaaatcagataattttttcaatcagcatggagtgttaaattcaggctttcttctacttgttgccatcacccagaaaagaaaaataagatttattttccagaggttggaactatactccaggtggctctctggcctgccaggccccatctgctccatgctgctaccacctccacgtgcagtcaagactctcttcattcctgtattgtgaagtcttttcatgtggtccctggttgcagtaatgaacaaagtatgccacagcagaactgctttatagaacctgtgtggtattagagttagaaaactgggagtattacctaatcagggctcttccttgtataggttaaggccactggagcccagagagactaagcaacttgcttcaggccacacagcaggtcagcagcacagcagacccggatctcctgagacccactgagcaccatgctctgaaccacaagtgtatgtttcagccacctcagattttctgtttcctttaaatctgtttccaaatagctgaacacttcactcatcccctaactcacttattcaatattcattgagggcattctggtgccagttttaggagctgaggacacatagctgtgaatggaaaagttgcttcctgctctgatggagcttatagttcattgaggaagatgggtgttaaatgcaaaattacacagagctcctctgtattgagctcccgcactgcctgacctgggacaggggctggaagaacaatgggattctgagacccagtggtctccaaggcaaaggaaagaacatggcagtgatgacaaggggatggcaaagtacagcaggtagaggaagaaactacagggatgcaagcaacagctccaacaaagaggtgtcccagggtgccaattctccgcaggggaaagaagaagggaaggagctgggtgctcctggtggaatgccggcttattcctgtcttcctctaggaatgcactccctccgtctccttctcaggctcccattcctctacccacaccctagattgtggcaatgtgcagagttctgctctctcccctctgctcttccctttctcctgtgaaatcttgaccctggccttgacccctttcctagcttcccaaacacccagtggttctcaagatcaatgtactaaaattgcctgctgtttcctgggccccatcccagtgccacatgttgggataggacccaggaatctgctttttaaaaataccctcggtgattctgatgcagatgttcagtctacctgctcactgagacccaaggtctggtaagcatcaaacactgggccaacactttcacttgctaagaacccagtattgtgggcacagaggtagggtctctgcatgagcatcctggccatttttagcacacctctataggtatgtgtgtaatatacagatgaggaaatggaacccacgtggcttggctagagtcacagaacttcaaagaataggcacctgactccacacccaaatccagtatctttgttcatctctttcaccaagttttcttgagctcaccgatacctccaacccccttttcctcctccccatttttacagctaacatccccattcatgcctgatcagttccctcctggtccactgccttccttcccaccacaggctccctgctgctccaagttgcctttcacactggccaacaagtggttatcctaaaagataaatctgatcaaacattccctgacttaatctctgatgaatcctcactcttatcatgcaacatccttcaagttgtggccccaacctcccttctcatcacatctcatcctatgccacatgaccatggtatcccttcctagaatactacattattcaagagtattggtttgagtatttgcctctgccacttacgtgtgattttagataaaatcacactgccacttctgtgtgattttaaataaattacttaatctttgtgtgcctcatttttctgaactgtaaaatgggctgttaccactagctccttcaaaaggctgttgtaaagacttaataaaagaaagatgacaagtataaagtgctcagcacagtgccatgaaaacagatgctccaaaatgctacctgatactaatgtcatcactgtcatcctaccatgtaaggactacttgttattctctgaacataccacatactttgaggtatctcactggaagtagacacctcttggtgctggaaactcctcatcaaaattctaaagtgactgcaaggtagggtggccataaaatatccattgttgtacaaggtgctttgtatgtgaaattttagttaattccccacataagtcttatgaggctcttgtcccttatcctcattttagagacgagcatgaggctcagacaggttaccaaaccagctccatatcagaatgctagtcactagtagaattggcattccaactaatatcagcctgatttcaatgttcacacttctgttcatttcttctatgtgaaaagaacacagatttttttttttttttttttttttttttactcacttagagtacactgtactgagaattgtgtcatggtatcttgtatcattcctaccctcctaagctcacccacatatcactggggctggaagcctagaaactacatcttactttctggcagggttccagctcagtcttcaccaatgacagaggcaaagactgggccctcaccagacactgagcctgctggcaccttgatcttaaacttggaattcccagcatccagaactatgagacataaatttaaaaatttacatatggccttttttttttttttttttgtgacagagtcactctgtcacccaggctggagtccagaggcactatgtcggctcaccacaacctccacctcccaggtttaagcgattctcctgcatcagcctcccaagaagctgggattacaggtgcctgccaccatatctggctaatttttgtattttcagtagagacgagttttcaccatgttgaccaggctggtctcaaactcctgacctcaggtgatctgcccgccttggcctcccaaagtgctgagattacaggcatgagccactgcacccagcctatgtatcacacattttgtggcattttgttacagcaatatgaatggacaagacggaaattaataccgagaagtagagtgttgtaacaaatacataaaatgtggaagtggctttagaaatgggtaatgagtagaagctggaagactttagagattcatgctgcaaagagtctagattattgtgaacagagtattaagggtgtttctggcaaaggttcaaaagaagaaagctggagagaaaggctcaatcttcttagatattataagtatagtcacaaacagaatgatggtagaaatatggatggtaaaggcaattctgatgaggtctctgacagaaacaagaaataagatattggaaactggaggaaaactcatagtcttcaagatagccaagaacttggctgaatcatgcccatgtctcaatgctttctgaaagggagaacttgcaggtgataaactaggatatctggtgaaagaagtatctaagcaaagtgttgagggtgctacatggcttctcttgactgtttatagtaaaagtgagataagaaatcaattaaagatgaatttataagtaaaagggaagcagagcttaaagattttgaaaattcccagcctggccaggacataaaggtatattatggagagaataccaacagtgtggctgagtcaatgtttgataaaaatattaagatgcctgatagggttattagtatgggtgtaaggaagccagatgctatttatcaagacaatgaaagaatgactccgaaggcatttcaaagatctctaaagttgtcactctcatcacaggcccagaatgccatggcctgggggacaaaactgtatgaaaaaagggatcttgggcacccatgagacctcagcactcgctgctctgtgccacctcaagtctctgcttactgaattctggtgtagtgctccttagatgccccagatgtgactcaagtgagcccaagtgtggctcaggcttcccctccagagggcataaacagtcaaccttggtggcatccacatggtgttgaccctgcaggtgtgcagagtgcataagctgtgggggcatggctacctccacccagatttcaaaagatgccctggagagcctcagtgcccaggcagagaactgccagggtgggtggggctgctctgagaaccctcactagtgcaattccctggagacatgggaattcagccactgcagagaacccctattagggcaatgttccatggagccatggagatgggcaacccttgagacctcagacctgtagagccaccatcacgcaacacaagcctgggagagagacaggcacccaaccccaaccactgagagctgctttgtggggcacgcccagcaaagccatgaagaatggggctgcctgggtctttggcccacccttgctgcacggtgtccaaaaggcaggacgtagagtcaaagaagatcattctcaagcctcgagatttaatgctgtttgtcttcttgtgttttatacttacttgggacctattaccttttcttcttccctatttatctcttttaaaataggaatgtctatcctgtgtttgtcccaacattgtattttggaagtatacaatttgatttcacaggcacacagctggagagcaatttgcctcaagatgaatcatatctaatttagatgacactttggacttacactttaaagctgatacaggagtaagacttctggggctattgagatggaatgaatgtattttgtatatgagaaggacatggattttggggcatctggaggagaacgctgtggcttaagtgcaggtgtacctgcaaaattcacatgttggaacttaaactctaaagtgacagtattacgagttggggcctttagaagatgattaagtaatgcggtcagagccctcatgaatgggaatagcaacattataaaagagctggagggaactaggtaggccctttttgtccttccatgtgacagcatagcattcaagccaccatctttgaaatagaaatggggtcctcatcagacaccaaacataatggtgccttaatcttggacttgtcaacctccagaactgtgagaaacagatttctattattcataaattacccattttgtggtaccttttatagtagcatgaatggtctaagacaccactgaacaattccctatctccctcctctccccagcccctggcaaccatcattctatttttttatttctgtaagtttgactgctctagatacatcacataagtacaatcatacagtacatgttattgatgactgatttatctgtcataacataaggtcttcaaggttcatccatgttgtagcatgtgccaggatttccttccttgttaaggctgagtaatattccattgtatgcgtataccacattttctttatccgtccatctgttgatgaacatttgggttgcttccatctcttggctactgtgaataatgctacaattaacgagtgtgtaaatatattttcaagattctgctttcaattattttagatatactgtcacgtgcagcataatggtgtttccgtcaatgacggactgcacatatgaaggtggtcctaggtggatagttggctatagcttctaggtttacaaaaatacagtctatgatgttcacacaatgatgaaattgcataatgactcatttctcagaatgtattcccatcattaaatgatacatgattctatttcaagaactgggattgctagatcatatggtggttctattttttatttttggttttccatatagactataccatttttacactctcacaaacaatgtacaaaggttccaatttttccagatgcttgacgtttatttctttttgtttgtctttttatagtggccaccctaatgggtgtaaggtgatatctcattgtggttttgatttgtatttctctaatgattagtgatgctaaacatattttcttttcttttttttttttttgagatagaggcttgctctgttacccaggctagagtgcagtggcacaatcttggctcactgcaacctccacctcccgggttcaagtaattctcctgcctcagcctcgtgagtagctgggattacagacacacgccaccatgcctgactaatttttgtattttttgtagagatggggttctcaccatgttggccaggttggtcttgaactcctgacctcaggtgatctgcccacctcggcctcccaaaatgctgggattacaggcatgaaccaccgtgcctggccgtattttcatgtttctcaccatttgtttatcttctttggacaaatgtctatttcagccctttttaaaaaaaaaaaaaaaatcaggttatttgttttgttattgttgagtggtaggcattctttatgtattccagatagtaaccctacaagagaggtttgtaaatattttctcccattccacaggttgtcttttaattctgttccctttgaaacacattagttttaagttagatatagtctcatttgtctatatttgctcttgtcgcctgtacttttggtgttatatccaagaaatcgctgccaaatccaacatcataaaactttctacctacattttcttctaggggttttacagttttcactctcatgtttaggtctttaatccattttgaattaatttttgtgtatggtgtaagttaaggatctgctacatgtggatattcaatttactaaatgccatttgttgaagaaattattctctctccattgtgtagtcttggtacccttagtgaagattatttgaccatgtatgtgagagcttcaaaggttttataaacctctaataccctgtattaaaccccttcctgattgaaatacctagaatggtttccgttttcctacctgaatccaaactgatggacacatcatgcttatatatgtttgcagctatgatttagaaggatcttggaagctataggtcttattttaaccttagacactctcagagttcttaaaagacataacatattcttgcttgttcatagctttcacaagttgtttcattgactacaaggctttgaatcctgagaaagtgcaatttgggtttcttaataaggaaacacaacacctaggaaaggaagcaattttaaaagatattggcagatttgaggaaagttttaaaaacagtttgctcaaatatctgttgctttccaaacataaagtatgatcgtgtcagcacagagcacagtgtcaaaactaggtagatgaagagggaaaacaggaggtctttttagaaaagggtaatttctctcaattaccaaatgtctcactgattagtagttgtggggaaataaattctggagttgtacctgtgaaattaatggggcatgtgatagatcactgcagctctgcaaggatgcgtgagaacagagtacgtgccttaagctcaactgggagatttatctttctgtgaaggtctgggctctcagggatagattgtacgtcaggtgccctacctccatatactcatgaagacaaattcctctgcaaagaagcagaagcagttgccctgcttgacagacagacgaatggaggggttaggaccacaggagtcttcaccaatgttttgttttataaatgtatcactaaattcctatgtttagaaatgccttcttcttgattcataaattacaagtcaaagaatgctagagtcagaagaaactgacttctgatattacaatggtcaataaggtccagggagggatgatgtgtggcccaaggtcacagagcaagttaatggcagagctaggacagaatccaggactccttatttttagatccatttcacagaagtgggtgtaggaagcccagagaaaggcagctcaaagtctgaggttagtgacagatctgggatgagttcccagggatgcttccttagccactaggcagaaggccatgctaaccaaaggcctggcagtagagataatgcctacccaattccaccatgtgcctgcagcccacacagaaccacaataataaccacaggaagaacagagctagaggggcctgaggtagctctgttgttaatatgttctacatatttaaaatcacatgtttccacccaatcctgggtaggaaaactgaggtccagaggttcaagtcaacagagcaaggcagagacagaagtgttatgtccatgtgctaaaaggtggatgcctgggagtcatcagtgggtgccactgacttgagctgctttggttcaaatccccttcccagcacttccaacctctatgatgaagggcaagttgcttaatctcttcgtgcctcaattttccatctataaagtgggaacacatgttacctacactgcatagggttttgtgaaccataaaggaaacaaggctttaaagcacctggcacagaatgagtgctttataaatgctagctattactattctcaaagagagatatccctgttggtgggaatacaagtgacgtcataaaaatctaataatctaggagagtattgaccaatagaaacacaatgtgagccacgtatgcaattctaaattttctaataggcacatttaaaaaggtaaaaaagaaatgggttacttttaataatttatctaacccaatacatctaaaatataatcatttcaacatgtaatcaacataaacattattaataagatgtttttacatgattttttcatactaagtttttgaaatctggtgtgtagtttacacttacaggactagccacatttccagtactccgtagccatgtgcggctaatgaccaccagattagatatggcaaatgggacctcaatggattactggattttccagattgttggactttattttttagagacatctcagccatcttgtttttactaaactggggaaaaaagactatatttatactaaactatttccttttcttaccaaatatcttagaatgcatatttgtaattcaaattactataatagccaaagcataatgaaaacctgtttctttactaaggaaaagacagatcacacatttaaaaatgaaaggttcacttgcaggagctctagcccctgcagcagcccaatcggttgaatggtccacgaagacatcgcctagcatcagcatccagccagcatcaccatgatcaggatgattctcagcaacgtcttcctctccggctgccctgggagtggctaaagttgaagcagcaggaaacagaggaatcttgaagaacgtcatctctgtggtcctgttaaatgtgtcgctgacacacgactgtttttgtgatgcttccttttcaaagaatttactccgaacaacatgcaggttcactgtatctgcatttacagagacactgacagacttagacaattcaacaaactgacaggatcaaccctccattaaaagtaaagcatttcttccatttttccagtgagaagacatcctctcctcaaaaaaaaagttttcgggcaactttaataaatacaattttaagtgtacagatgattgaattaggcaaaagtccacttatggtatctaatatacaatttaattacacatacattttaaaatcacgtttcataaaatattaattgaaaaatagagagtggttcagggcacagattctggatccagacggcctgaattcaaatctcagctcctccatttactgtaactcacttttgagagagttgacattctgggcctcagtttcctcctctttaaaataagggtgataataacatccagctcacagtgttgttgaagtattaaacgatgtaaaaacatgtaaagcccttagaacactgtccaggaagtggtatacacatgttaggttaaaagacatagtggtttattatccattcacatagactttagaacctctttattctttctttctttcttcctttcttttttgagatgaagttttgctttcgttgctcaggctggagggcaatggcgcagtctcagctcactgcaacctctgcctcccagacaacccctttattctaactcgtcaaatgcagcagtgtttgtcatcagaagaagcacttttttagttgaacgatgccagtctccatcactttcacttcccattacaccatttggaatataatactttttgaatctaggtatgatgtcacagaaaactgagtgtcaaggcaagcatctatgtggatattagcacagacaggttttcccatttatctggcagctgtatattctgatcaccaaaaggacatcatgttgcttttcaaagccattgttaggacattgttaggaaacttgttcataaccatcaccaacactcgtcattacttgctcatatcctccggaataattactaaacctgcgttcaatttccttgccttttctatcaattctgtgatccctgtaaacatcccaaactagcactgattggggtcactgcaggctaatgtagtttctacaattaattttgtagctccaagtacacgaaaaaccatcttataatatgagatgttttgtaagaacttttctcagagctgtttggagacaaagatcttgtcttttatttgggcacacagaaggcattctggcatttctttcttctcccacctctatctcttaggtgttagttgaataaaccatggttcattcacccaggagaatatcatgtagccttggaaggtgaaaactaactctgaatacagtggcataaaaagagatggatgacagaagagtttgggagctatgattctattcactgtctacactcctaagtggccacagtgcagctgtccagagcacagcctggaccctttccaagggcacgtcctgcctccaccatatgctaacgatgacctgggcaagtcattcaagttttctgtgcctaggtttcctgatctgtaaaatgcagataacagcatctacatcagaggactgttgcaaagattaaataagttactatatttcaagtacttaggatagtacctgacacatagtaagcactacataggtagtacgtctctattactattaccacatacagatactctctgtcttcctccttccctctctccatcctccttcactctctccctttctctctcaaaacacatcaatatgttaatggtgatatttaggctaactgtaatcagggtggagagaggtaacttatatgttcaaactcagcattttttaagaataaatatataatattttgtcattaaagaggaaagaaaaaaatgtactgactcaacaattgctaaatgggaacataagaacttacaactttaaaccaatcaataataatatcaggtgtgattaaggacacttaaaggcccatacttccatatgattttattgtaagcctcacattaaaggaagagtaggtcaatctgagaatagattacatctttccaagaggagccagttacatgtgtcacaagcagtgccacacattcatgagagtgtgccaggccccagagcgaaggaagggatcatccccagtgtctctttatttgcccgaaggatcctgggaccaacttcagagcagaagaacccagaccaatcaggacctgggaccaagtggcccatcctgaccaaagcctcgtcaagctcagagtcgggctcaagacatgaaagctacagatgccccaggtgccacgaaaatgccaaagcaagtggcagcccctttagggtcctcctgaaaccactttctcccaactttcccaacacgaataactttaacaataattcagttatttttaaataaccgccttccttattccaggccccatgcaggatacaaggaattcagcaacgagaggcagtccataccctgcagccactcacaggcctagtagggaatcagagacaacatgtgataaactcagctacagaagcatagtagagaggtaagcgctgtgaggggagtcagggagggcctcctggaggaggtgacatttgtgccggggtttgatttaggaggaaggaaaagtggagctgtgctcttagccttagggatcagcaagtacaaaggcacgacagtgtgacctgtagggtttgtggttgaaacaagagatatcaactatgactatcttttaaaaaatacgaagtttctggaatattgagaagctcataatgaacagaaagctgaaggatcaggcctgaaaaataagcagaaaaaaaagggagttctgggagatcaacaagcaagaagtccagcaactttgtagcacaaacaccatggccagacaccacccctactactgcacaccccaattctccagcctctggctgctggcccatccttcctagatgaaaagtcctgggcagcagggtccacctgctgcatccaggttacctattcagccacacccaggctgccaggaaatgatgagcagctggcatcttcacctctcagcgagctacacaatccactgagactcaacacaatgagagataccccaaatcaagaaacagggttggagactggactcccaaaacaataacacaaaggctgctctcgtgtgattacacagaaggggaaatgaaagagaaaagggcaggagggggcactgaggctcaagatacatgctggggtcgcatcatgagaaagttcaattattaataagagcaaatcatctaacaaacatttgccgctacctactaagccccagcattgcggttacaaatataaatacaatgttgttcctgcctacaagaaccgaagctagctctgtttatggcccgtgaacaagcttgcagttcatccaataaacatgagggagcccacacagctttttacagctagcatccacctggattgactagtgcttggaccattctattcgacaatatttccaacactattcttgctaaagcccagggagtacctaagctaagagctagaacaaggtgcaatcaggggaccatcgacagtgcctggcttgtgtttagtgcttcagaatttgcaaagcattttcccaaccatcaagtcatgggcaaatgtccaggactacatgtttgccatgtggatgatattccttctccagatgtcaaagataatacacaaccattctgttttgggtatataagggaatacagaaatatatacatatgaaaacaaattcgataacttctattggagatgagcacagagatgtatgtacaagaatactcaccgcaacatgattcaggagtaactggaaaggacttaaatatgcaacaatatggggtgatgaaataaatcgtggaacagtcattgcaatgggaaactatgaaacctttagaaaacatggttttatggaacatttaatgacatgggaaaatgctaaagaaaaaagtattaaatagcaaaatacatatttatgcaagtttgtgtgaacatatgactttcatttcattctttatagctatctctattgagcattttctcaacaatgaatacacattatttttgccatcataaatcatgactgcaagtagaaacaatttttaaagatgcttagttgacaacagtaccatgtctgcaatatatatttctctagcctggacatcaagcctgactcctcagccacataaaactcacatgaccttggaccagttgcttcacttctctgggactctgttttctcaaaaacaagtgacaatatctcgaactcatgggatggtgggacattagacaaaatgttgtacaggatgatgcctaacccacttcttagttagagtggacaagtagtaaatgccagctcccttagaagaaagcaacgctggccgggcgtggtggctgacacctgtaatcccagcactttgggaggccgaggtgggcggatcatgaggtcaggagattgagaccatcctggctaacatggtgaaaccccgtctctactaaaaatacagaaaaattagctgggcctggtggtggatgcctgtagtcccagctactcgagaggctgaggcaggagaatggcgtgaatctgggaggcggagcttgcagtgagccgagatcgtgctacagcactccagccctggcgaccgagcgagactccatctcaaaaaaacaaaacaaaacaaaaaaacagaagaaagcaaagcttccaatacttacagagctcgtgtggaaaaggtaacctgggtaggtgatggggtcagggtactgatgtgtaattgacctggttttagtttcctagaactgctattaaaaattaccatgagctgggtggcttaagacaacagaaacctattgtctcacagttctggaagctagaagtccaaaatcagggtattggcagggccacgttgtctccaaaagctctagagaagaacccgtcaacttgccttgcctgacttctggtttctgttgacaatcctcagcattccttgccttatggctgcattgccccaatctccactgccatctgcatgtggcctccttccctatgtgtgtatgtatctttgcctccacgagtcgtattgggttagaacccaatatgaccagcctgacctcatcctaatttgatcatttctataaatacttattttcaattaagtgtgacatttacagatatcaggggttaggacttcaacttatctttttaggagacaccattcaacccaaacagacctcaaccctccctttagacacatgagcagttagagcaaggcaggaacccacagggaaaggccccatggtgtgaaggaacaggccaggaccaccctggagacggtgctgcttccatgacatgctagttgggtgaaatgtgtgtgtgtgtgtgtgtgtgtgcgcgtgtgtgtgtgtgcatgtgcatgtgtgtcacctgtgtgtgtgttctcccaactcctcctccttccaatctggaaactcactaagctttttgtatttttctgctctagaaatgtgtgtaggaaaaatagaagaagctgcttgaaatcaaggcttccttccttcctcctttgttttttctaactctaaacttacttaagagagaatgctggggtctggaaggactgggccaagaagggtgtgcttttgaaggctaagatggtgaggagagaggttctcccattttacgaaggtgggaggtatggatctgctggtgccacactcctccgtggcagtacctgaggaggggcaggcccgggggggtttgtgggtggtgcacctgggctggctgggctgtgacaatggctcctagcctgagaaagcagcagcagaatcactagacctaaagggaatgcagcagtgggattcccagagaaaatcacaacagtctgctgaaaccccaggaaactcatagaaccctagggaagagggagctccaacagtgcctaaaatatagtctcagctccctggggactgagggtcagattcaggtttatgtaaagaagagaaataagtgagtatttcttatgtacctgattttgcaacctgatattcaaccctaatccataccttatgtttaaaagaatgtcctacaagtattcaaaggatatagaagcaagccacccaagccccactacctctggcttcagccctttccgaaggatacctccagcactcacatcttccttcagcccccaggatgccctcctgctgggccctgggctgtaattcagggctgtacctcagggatgacttgtggaaacccatgccaaagatggggaaggcagggctaggaactggtggtagctgtagttagttccataggcaggatagacagctagagagagggtttgtgagtgagtgtactaacccctgctcctctgtgacagcctcaataacgataaggtagtgaaaccaggtctgaagcctggaatgctagtgcaagagcttctcccatggacagagatgaggaaaagtctgtatttaggttgacacaaaagtagttgtggtttttgccattactttcaatggcaaataacagtaggtgtgtgtaacattcaattcacagaggtggggtggaggaaatgtctaagccctcgatgcagcaatgcatcctggacttgaaaagcctctctggcctgtcaggacccacagtagaacacctgctgagcagctcgcctttgtaaagcagcatcagtgagctagaagtgggggcaaggtctcaggtggacttggacttccagccccagagattgcaagaaccagaaaacatttagaaaaaccagcattgactaacccctactccaggcagacagttcacactcatgcagacatcctccatttaactctcacactggtccccaagataaagatgtggaaactgggagttgagaccctagggtcactcagctgttgtgtaagattggaatacactgacttgcaaacatgtctatgataacgattttgaaagcaaagaacaggatgttatgagtgagaataaggaggaagtccatctttagacagacggataagggaagattgccttgaggagtcctgtgagctgagacatgaagaaatcagcaaagcgccagatgcagtggctcatgcctgtaatcccagcactttgggaggccgaggcggaaggatcaactgaggtcaggaggtcgagaccagcctggtcaacgtggcaaaactccatctctactaaaaatacaaaagttagccaggcatggcgatgtgcgcctgtagtctcagctacttgggagtctgaggcatgagaatcacttgaacctgggaggtggaggctgcagtgagctgagataacgccacagcactccagcctgggcaacagagcgacactctgtctcaaaaaaaaaaaaaaaaaaaaaaaaagagagagagagacaaccaaagaacgaaagagaaatcaacaaagtgaagaattgagaaaacaaattctggtgagaaggaacaaggaacaatatgtgcaaaggacccgtgccaagaaagaatctgacacatctcaggaactaaaacacaccaggtatgagagaggagaagaaaaggggcccaaagaagacattggatcatgcaggatcttataggccatgacaaggatttcagatttcatcctatgtgccaggggaggccatcagcaggattaagtcccaaaatgacatggaatgagttacccagaccaagtatagcagggagctcgtcatacaaaggggatgggcaaaaagctgtggaacatctgaataaacagactcaaacttgacttccaagatgaggagaactgctggctttacagaaagaaaagcaagatttcagcctatgcccataagaagaacaaacagttttgcctaatccaaattcgctttcatgcctctctgcctaagaggcacacagagctgctgaaatccacaggcgcatcatgacagaataatttcagtgatcattatcaaatgcctctatttagaaaagcccagaagattgtattagcatgatccaatatttatgaaatgacaccctgccataatgaggggctgagaaaattaatattagaagcaaaagccatgtctttggggagagagagtagcatgagtaaaaagacacacttttactcagcttcttagaacttggttttctgatccgtaaaatgggaaggatagtagcaaagaggaaaatacatgatcagttagtaaagcacccaaaggcctttaatcttttttcattcattcctgtattaataaaaacacttaataaagactatttgcccatccacacatccatccaacaaattgctaatttagtacataggatgtctgatgtactgcattaggcactgaagataaagttatgaacaagattctcatggtccccattcacatagaacttctcatctgggagtaaaccatgcactggatgaataacacctgctgtgatgcgtgctactaaggacaagtgcaaggtgcaacgggaaccattacaaagaatgctgacccagactgagatatgaagaggacgcacaagacagtaggtaggggaaaggctccgtggaggatgccaatctcatgtgagttcccgaggcaggagagagtcagaacattctggcaattggcagaagccagtgtaaagtgagcagagtgggatgtggagcatgatgatgatttggaggtttagggaggatcagcactcagagctttggagaccacaacagggctttggtctttcctggagcaatgagaagcctcagaaagccttaagacagaagctgggtagagacaaggaagaaaagaagtaacatgaacatgcttatattctagaataatctcttcgacatctgtttggagaatggattaaagtccaaagagttaagtcaaggagtctgttagaaagttttccacttacccaggaaacagacaatggttgtgttcaccagggcagtggtggcagagatggagaggcttgggcagacccaaactatacttaggaagtaaaatggcagaacaaagtgattgattggaaaagtgggtaagagagagaaaaaagagaaacatggccccccggtttctgaatcagtaccagtagggtgaagtgagctttctggagacgaggaacagtggaaagtgagtagacagggaaggggaaatgggtaaatcaagagttcagttttggagatgttgagcttggagagcctacaacatgctacagggctttaagtggactaaagatgagcagaaagagcatatgtgaatacacacacacccatacacatgcatatgcacacaccgccatatacacacacccatacaaacacacggacacacacacacacctcccatacacccccatacacacacacccatacacccccatacactctcacacatacccatacacatgcacacacaccctccataaacgcacacccatacacacacaacccttacacccccatatgcacacacacacacccccatacacatagacacacacccccatagacatgcatacacacatacaccaatacacccccatacacacacacacacacacataccagtacacaggcatgcacacacaccacacccatacacccccatacacacacacacacgcatacacacacgtatacacactataagatccagatttattgggccactatcaaggagggccatgaagagtagagcagatgtgctatgtttaagcagaggtgtcttggattcttggggtccctaatgggatgggtgattctatcatgtaaaccaggcagtactttttaaagtcagcatgattgggcaacagacagaggttgttccacactgccttgctaataggcatgcacacctgttgatgactttgctcattcaaagtaaggtcccaccagatctgaaatgctcaattttgtaccacagcctaactttattacacctaaggcttgtatcaacacttttgagaaatttatacaattaatgcccttaataggagctatccataaccatccagtgcctcctgttttggagccagactcaaagtgaatgaggccacaccctcacctgggcatctctgagcatcttctttgctcccactttagtagcatcctggaaaaccccgttctccagaggtagccaagatgacatggcagctgggcagtgggttgtgtaggtgtaaaattcctgagacatctaggctggaggcataaatgtcagaatcaccagcacagaggcagtatctgaggccatgggagtggttgaggccaaccacagaaagaacacccagtaagcctgaagaactcttaatactccatggccagagtgcactgacaggggagactgagaaagagcacctgggggattggtgaaaaccaagacaggtgtgggttaaagtgagggagcctttggtcaagcagaaactgtagaaaatggcctcccttctccaacaagcagttgtctttacaactgcagcagggacatgtgattattcagaaaagtgagcttcactttctcagagtcacaactcttcctggcttctatcaccaggtaagcctcttcaagatgcaccttacgcaggtataccccacatttagagtctaagtgttctctctgagaagacctcctttgggtacttcccctgaaacatatcaggtgtacctcacaggcctgccccatgcaggtatccatcaagaattcacactaggccttcagcgctgctggttaaggacaaaaggttggtatttagaatgtcaggatgtttaccttataatacaatatataataataatataataatatataataataatatattatataataatatgaccttataaaaatctgtggaagtatccctaaatatatatataaattatataatatatatactatgtaacatatataatgtataatataatatataaccttataataatctgactgtagaagtctccctaagtatataaaatatatgtaaataatataacacacaataatagataataatatgataatatataacaataatataataatataattaatataaccttataatagtctgtactgttgaagtttccctaaatatatacaacctatgtccatgtggcctggaagaaaagcagcgaccgtaaattcttcagaagctctttccctgacacgccactgtcatcaggctcccaagcaaaacccagtgatacctacttgtagctaaagcttagaatctcgacgctaaaagaaatgctgaatccaggtgacatgtgactagtatcaaatcctgaagaattcattcagccttggtttgaccacctctgagtgtggggaactcactacctacagagctatcgattgccatctcagagagctcaatgtgtaagtaagttcttccccccatgattcacggtaaaaactagccatccccattacagccccaaacatgatggatcacatacctgtgggcactgcctggtccagcattggtttctcccatgtgttaatctgctcccaggtgaacccattggtccctagagccacactataaccacagttgctgtagtgctcatcaaaggaacagccacctgtagacaaaagagatatgggtaaatacattcccgtgtctgaggcttggttcgttacctctgtctcgtcggctcttcatttacagctttgaattttaaactctggagaagattttccatatatatatatatatatataaaagatgagcaaattggatttttatatttgctttggtgctctcaggaaaggcactggcatctgcaggcctccgtatttaaaaaagttaataaggctagttacattgatttcaatcttccttcctgagaaagtaaacagcagcgtctcattctaagtaggaaaaatgaatgcaggggcatgcctctgtaattgctttgtgcagcacggagagatgctgtgaggcagcggaaggagcactcacttcccagtctggcaaaactagacagccatcaccttcacaaggctgtgtgagctcaggccagatgcttcatacctgagcatctccgtttcctcacctatgatacggagggaaatgtccaacctcacagaaataccatgaggaataaatggaataacatgtgaaaagtaactgccacagaatactttctcagtgcccacctgtttctctgtaaaaagcagtctgaaaaatcatttttcatggagtgagaatcgaattggtaagaaattagacaatcatgcacctggaagataataaagtcaatgttgatcatgtttaaagcttctccctttaactttaaaggtcaagccatccaccatttgacaataagttatattcatttgctgttgacaaggattcactgagcatacgctctgagctgtaagtcccatcaaggtgacattgagagagatgtggggtgtacaatggaggctccaactaggaaacactggtctgtccagagaaatgagcccattatattctggaggagaaagcagaagtggaggagaagtgaacagggctttgaaggatgggagcatctccatgggcggagggcaggaggaatggcattctgagttgagcctgcagggtgcacaaatgcagggaggcagaactgggactgagttctacagcagcctcctggctggtctcccagacctgtttcacactccagtccatcttttccaatgtccctttcttgtctctttaatgttcacagggtgcatcacatcaccatcctcctcctttaaacgctcacaggtttcccaccccacagagaaccaatgtctgctatagattaaatgtgtgaatgcctgcaaaattcatgctgaagtttcaaaccccaaagtgatagtattaggacacatggcctttgggaggtgattaggacatgaaggcagactccacatgattgggactgggattgggaccagtgcccttataaagagaccccagagagctatctcgccccttccaccatgtgaggacacaaggagaaggtgccatcaaagaagcaggagctgggccctcaccagatgctgaatctgccaatgtctcgatcttatacttcctagtccccaggactgtgagaaatcaatttctgttgtttataagccactcagtcatggtattttgttatggcagcctaaattgactaagaaaataaacaaacatggctttattcagttcatcccacactagcccggccatgtgctcattaacatcacactattgtctccatcagctgcaaagaaccaaattctttctctgcaccccagacctgagatttcctctggatagtggtggtggacatcctgttgacagatctgacatagaatacagtccaaacaccatggaagaaaacctgtgatagaaaagctttctccactttcctttcttgttggatatggacacccagaagagctggccttcagcaactactatggtccaaatgtgcgtgttccccttaaattcatatgttgaagcctaatccccaatgtaatagtattaggtggagcctttgggagatgcttccaaaggactgtgagggctctgttctcagaaatgagatcgcacccttataaaagatgccctaggcaaatcgttcaccccttctgccatgtgcggactcatagaaggtgccatctataaggaagggacctttaccaagtaccaaatctgctatcaccttgatcttgaacttgccaacccccagaactatgagcaataactttctattttttaaataacccagtttaaggcattttgttataacagccgaaatggattaagacagcaccccactgagtatctctactctgtagaggaaagccacccagagactcgcctgaccaggaatatcagcattcaacttttcaggagcaaaatataaacttttcttgtcatatgccactgagatcttagggtttaactgttagcaccgtagagctttgtacaacctgactaatatataaagtgtgtcatacctcaacacagtgatccaaagaaagaaagaagaagcatattctcccaagcatttgctctgtgttgggcaacatattcgacaccgattacatatactatctcattagctgtcatgtaatcctcacaaaccacatgaggtacattttatctcaactttaaatctaagagaattgatgcactgaggggataaatgacctgctcaggcaacatggaaggaaagtgttggagccaatattaaatccatggcagcatagctgtagagcccatgcccatcctaatagaccagagagagaattattcccccaaaccaaggataaggtctttcacttataaggtaataagaggggccaggcagataaagaacttccaaggtggttgggcctctccattcaaatccattccttcacttattctagaaacattcaacaagtttttttaatgggctctggacatggcacagaattgacagatatgatccttaccctcacaaagtttgcagaatagagtgaaaggtaagcatgcaaatatacactgaagatgcaatggaaaatatgctttcttatgtatgtgttgatgctaaaaaaaacaagttattattttagttgatggtttaattaaccaaattctcttccttcttctagataagatttaagaaggctcacagctatacctctaggcatcccaggttacagatcccaggcaaggtcacattaacacttgcccctagtccgttggatccattgcccacccctcacctccctgcctctgcttaactgtaggtagacactcagctgatactgagctgactgctgacaggtcctggccctctgaggactagggatgtacctcctcttcacaggcactcactgaaccaccttgcttctcccctctgctgagctctgttggtcacttcaatctgcagcaggtaagcaaatgcttttcccttcttacagtctgctctttgaaactagggttccacagcagcaggccttggacctcagtgacccaatttttattttcaaaccacagtcctctctttgcctctgcagaagaactcacttagagtgaatttaaaagcagctttccactctatcttgagccactatttcttcagaatattcaggccccactgtcaattctattccactctgccaggatttgtcatcacttatgggatgacttatgcattcaggacagaaaatggggaccgtaaggtcactctggggaccttaatgtccctcctacagaagagtttctagaaatgggctcctgttctgcacttttatcactcatacatgtctgaatcccagcaatacacacagttcatgattcttccatggagcccttgggctcccagcaaagcagggaatttcaaggaatgctgcctaactggtcactggtccaaccaaagcagcaggttaaacatagaaggaggaaatactgcatgatgacaaaaatcaaattgaggacaggaaaagaaagaaaagcaggacagaaggagggagccacaaatctatgctgcgattttccacgtgttcctttactaaaagggggttacatatatagctctgagcttctgacacccaatagaaaaaaagcaaaacctggtaaggtactggacactctgtgtttttataataaaagccaaattgctcagggaaatgacaaccatttcaggtgctttgatcagacaagaatttctctgcaggaatactcataacagaaaccccatatcccataatgaaacaacatctgcacaaggggctgaatggccaatttcatgagactgtttctcatcatcattctcaatataaattgatagcatcacctaaacacacaattcagtaaaagctcattggggcccaacgcaatgcagtctggatacccactccctattggtctgacttgactcaaaggtaagttttaagaactattcaggggagatttttaggcaacttttatgagttttctgtctcccacattgagaaacagagtggctatgaactcaagactacataacccaatagcaactgacactgacatctgggtacaacctgttgggctcatatcccttccctgtttctgagccttcattttctgctgtgcaaggcaaagggctgaacaagatgattgcaatgaaccttccacttgtaacatttaagaaatccagagattcagaaagaactggaactctcagaaaccacagagatacagacccatgcagtcagcacaagtacaggctagggtgtcctgccactgagagccaccaagaggaggaggagaaattaaagccaagcttcccctggaccgagaacagaaaacatttaaacccagtaacatctatctgtcttggagcaattcctagtggccataaccaaaacaggccccagacgttgctgcaggtgtttatggcagcttaggggagatttatggttccagagagtccctgatacagtttggctgtgtccccactcaaatctcatcctgaattgtagctcccataattcccatgtgttgtgggagggacctggtgggagataattgaatcataggggtggtttcccccatactgttctcctggtagtaagtctcgcaagatctgatgatttttaaggggtttcccctttcgcttggctctcattctttcttgtctgccaccatgtaagatgtgcctttcaccttccaccatgattgtgccgcctccccagccacatggaactgtgaatccactaaacctgtttctttataaattacccagtcttggctatgtctttatcagcagtgtgaaaacggactaatacagtccccaaagacactcatctggatgctaacctcattcaggtttgaagagcagatgacatcatttaagtgatctcgacctcaccacaatcatttttgggaggaaggaaacccaaaaaatctacccccatcccaggagctgggctcagctgaggtttggtgaagatccacataattgggggaggacagggaagtgcagccactggccaaggacccagcacctccccagaggagctatttccctgggcaggctgaggtcaaaatgtggcaatggccccagatgctctgatgtgaatcagacataaaaagtcaacagagaaatggaaaactgtagcaaggaaattggattttgaaaatccatttgggtttggtagtgtatagcatatcagcatctgtaagggaagtaaaaatagtgcaggatacatactttaggatacattaaagcataaataaagtttatagtgtcaatcagaatttttttaaaaaacatgagctcttcttttgaaaatgagagaggaatagaattcaataaaaatataaatgtgtcttcctctgcatttcttagatatgatcctgtgtattcttgagctgaattaagttttgtagaggaactaaaagattcgttgggctcccactgtgtgccaggcactgtatttgaactatgtaggtgtatgtgtatatctgtatatatattaacgtagatgtaggtgactcaaacaccaccactctctaagacaggagtcatcaaacattttccataaaagactagacagtaaatattttcagctctgtagtcacacagcctctgtcacaactactcagttctaccactgcagtgcaaaaatatgtaaataaatgagtgtggctgtgttccaataaaactttatttgcaagaggtgacagcctagatttgcccaggggctatagtttgccaacccttgctctaagaaagaagtattgctttcttctttgtataaatgaaaacttgtcatcagagctcctaaggaacttacccagcgagggaaaaacaatgacatcatgtacagcagtactaatagcaacacctccttttattcacagttgaatgtaatggaggctttacctacagtatctaaccctcaccacaagccctgccattttgattgtaccattttatagatgatgtatcaaactcacccacatgaaggaatggagccaagatgtgagccctagactggatggtaccaaagcctgggtactttccattgctccaacccagcattcttttgaacactctgtgtgttcacagaatctggtctcaccatgatgcttccagaatagaaagatgttcttttaatatccagcagtggagctaagtaaaaaaaaaaaaaagaaaactgggctaaacctaaaaaaggtggaaaattgcctttacttgccctccgtggtaggcactacttttggtagagctcatcattttgatgaacgtggctggagattaaggtgatctgccatggatgaggatacgcagaaacacctgctccctgatccatagctggtgctgaaagtcctagtagctcactccacatacattctcatgattcttgggggagacgtcagcactggggaccctggggtgggggaagggactgagaccacaggactgcgtccctccaactaaagctccatagcaacagggacatgccacaagggtctctttcctcagagtctgtcccatagtatatgcttgcactttattgttcagtgaatgcctgaatatattaaaaaggacctccattcacgtagaggagccaggctggggcccacagagaaagctctcatccactgtcattgggcttctcctgggggccacggtgaacccaggggaggccttgcaggggagtaagagcgaagaactcagaaatcaggctgggacctttaagaaactaccatcagagtgaacaggcaacctacaaaatgggagaaaattttcgcaacctactcatctgacaaagggctaatatccagaatctacaatgaactcaaacaaatttacaagaaaaaaacaaccccatcacaaagtggccaaaggatatgaacagacacttctcaaaagaagacgtttatgcagccaaaagacacatgaaaaaatgctcatcatcactggccatcagagaaatgcaaatcaaaaccacaatgagataccatctcataccagttagaatggctatcattaaaaagtcaggaaataacaggtgctggagaggatgtggagaaataggaacacttttacactgttggtgggactgtaaactagttcaaccattgtggaagtcagtgtggcgattcctcagggatctagaactagaaataccatttgacccagccatcccattactgggtatatacccaaaggactataaatcatgctgctataaagacacatgcacacgtatgtttattgcagcactattcacaatagcaaagacttggaaccaacccaaatgtccaacaacgatagactggattaaggaaatgtggcacatatacaccatggaatactatgcagccataaaaaatgatgagttcatgtcctttgtagggacatggatgaaattggaaatcatcattctcagtaaactatcgcaaggacaaaaaaccaaacaccacatgttctcactcatagatgggaattgaacaatgagaacacatggacacaggaaggggaacatcacactctggggactgttgtggggtggggggagtggggagggatagcattaggagatatacctaatgctaaatgacgagttaatgggtgccacacacctgcatggcatatgtatacatatgtaacaaacctgcacattgtgcacatgtaccctaaaacttaaggtataataataataaaaaattaaaaattaaaaaattaaaaaaaaaagaacatttgctctgatcacatgaagggccaaaacagatggagattctgaatccgagaaagaagggaagtccaaggttgatctaaggaagcgccataaggccaccaggaaatggagaagagtaagttgagaccacggacaggtggagaagtcattcaaggagaaatgagagtatttgcgagaggaccagaatgacagctgagactgctaaggagtaaactgtgagctgagcttgataacggtttgcaaggaccaagtaatcacaatgcaaggtcaaagagacggggacagaaagctgctgagcagacacagatcccaactagatctgagagatagtcaagataaccatgtccagtgcccagcactgttctcagtgttcaccagtagtaactcatttaattatcccaatcaccccacgagatggatatgatcattaaccccaattttatagacaaagaaatgaaggcatagaaaggttaaaaaaaaaaactatcccaagatcacacaaataacaggtggcaaagcgtggctttgaacccagactagctcagtctatgtacctactcattatactaggttgccatggtgatgaactgaaaagataaccttgacctcgaaaggaacctgttgagggaaataagtggctgcacagttcttccccaatccctgtaaaatggcattcagccagtctgcatgccttctgcccccattcactgcccaggcccaggatgccaatctgcacttctggaggaccaggcatagggggtaggctctgccccttcacctcataacggaggccatagtgttatagggaggagaagaaatggagtagggggcttaaagtcaggaaggcaggcacatgcagagaacagggggtggtgtgggcctcacatagtaatcgctggtatgtgaagagctcacacatgtgagctgttcagacagattcaagatgtagcaagaataaatggttacagggcacagaaaaataatgtggtcaaagcagttattttttaactggggggttgttaaactttttctataaaaggctagatagtaaatattttcagctttgcaggttgtattagcctgctagggctgctgtaaaaaaatgccacaaactgtgtgacttaaacaatagacatttatttttacacagttctggaggccaggaatctcagaccaaagttgggcagggtcaggtgagggcttgcttcctggctggcagatggccgccttctcactgtgtcctcacacagcctttccttggtgcctgtgtactctgatgcatcttcccagcccaatggaactaaggtctcatgcatataacctcatttaaccttcttataggccttgtctccaaacacagtcacatggggagacatcgcaaaattccttcacctttgtcattcactaagataagctaatcaagacagtgaaatccatcacatgcacagtccacgcaaggagtgggaagtactcaggatgtgtaccccagaggccaggaatcttgggggctgtcttagaatcccacccatcacagggggccacatgttccctgtcactagtactcaacaatgttattgttgtacagaaacaatacaaaaagaatgggcatgactgtgttctaataagactttatttattagcactgcatgttgcatttcatatgattttcacatgtcccaaaatagtattcttcttttgattcctaaccatttaaaaatgtaaaaaccattccttatttgtgggctatataaaaaccagtgaacactcagatttggctggtaggctatagctggctgacttctctttaacgacataaaaattcccagttttagcagtcactgaattttaatacagtcccgtgtattgccatttgaatgtatgccatgtgctactgaccctctcctccaaagactcgattgcagaatgtttcttcccgtctctgggaactggagggaggaacacgtctcccattgtctgctagccctacggataagggattgagtaaagaacactagctctttagatttaattaaacacttcatctacactacaagcttgtgttcttcattggtaaggagtagtacttccactttatagataaggaaactgaggcaggagtggatgatgcactcagcgtcagatcagggactgagccaagactccaatcatgggtttgtttcttggccagaaggtctgacaaccaaggcgacctccaagataggtccacctacaaaatttggagcgccccttgcaagactaaaatgcagagtctcttcttcaaaattaagaaatcaagatggtgccaggcgcgatggctcatgcctgtaatcccagcactttgggaggcctaggcgggtggatctcctgaggctggagtttgagaccagcctggccaacatggtgaaatcccgtcttcactaaaaatacaaaattagccaggcgtggtggcgcatgcctgtaattccagctactcgggaggctgacacaggagaatcgcttgaacctgggaggcggaggttgtggtgagccgagatcatgccattgcactccaatctaagcaacatgagcacaactccgtctcaaaaaaaaaaaaaaaaaaaatagaaatcaagatggtgatagcagagcattaaaccaagcacgggctcttctcttctgagttccagggcctgtatgactcagtgcccttgaagccaatcctgctctgtggacacatattccaaagataaaatacctcaacccccaaatcatggagattccaccctcgtgccaacaaatgctttgaaggcagggtaatatctaagtggggcttattaattgtgaacaccctatcgtgggtagctgattcttgcccccggaatgaatgtaaaccagccttccataaattgaattccttttctgaatatataattgaatttggagaagtgtgtgccgggggggtgtttaaataagtgcacaaatatggtaagaaggccttcacaccattacatctaattcagtaagcaaaaataatggcagggcacgttccaattagtgtttgatttatttgctttaacaaatccaattagtagaatgttttataaagtcatccaatgtcatacattcatggactcaacagatacaaacaatactcctaatataaaaaaaagttttaaagctctttgagcagtgaatttattataaataagatgatgtctctctgatggctcgagcattccccaaggaccaagaaaacagtgtctgatctgttcatttggttctttttctgtgagactttgtgcagcaactcaggttaatgtggcccattatattaaatccaggaatgaaaacaacaaaggtggaagttagccaaggaacttcaagggagaataatgaacttgctgctgggtgtcttctagatcagagacgtgtttcgacttccaaggcagcacagtacagtgggaaaagcccaggggtaacagaaacggcggtgccctagaaccaaatctgatgccttcatgcccttttgggtctccagttttctcacatattaaataaagagttcaatgaggttaagcagcccccagaaatgcccaccttgggtggtggatgatgttctttgcccagggagacacagaacaaggtagcagttaaagctatgaactccagagccagcatctaagctctgctatttttttttacttagttatatgaccttggccaacttatgtaacttctatgtgcttcatttctccatctgtaaaactaggataatagtgcctaactcttaaggctgttatgaggattgggtaatttaatatttgtaaacacttggaatagtacctggcacgtagtcagtgccaagttgtgtgttaaattaatatttaatcccaatctataaattagaaatggaaaaggcagatgtattacatgtggtcagctggcataatctcaccaaacaaacaaaatgttttaaagaaactgtatctgagtctgcccatcatatcccttatagatcatcagggctaattgtggtatgctattggtctgcatgggaaatcccagcttctgtcaccccttactactgtgtgactttgaataagtcatgtagactctagggccagcatttctccatgtgtgacagaagcagcaagttgaaccctctccgagaacctttttgttgctgttgttaagagacggggtcttgctctgtcacccaggctggagtgcagtgtcatatcatagctcacttgaagcctggaactcctgggctcaagcaatcctcctgtgccagcctcccaagtagctaggactacaggcatgtaccaccaaacttggctaatttttaaattttttgtagagatgggttcttcctatgtgctcaggctggtctcaaactgctggccctaagtgatcctccctcctgggccttccaaagcactgggattataggcactgtcccccaccttctaagaatcctttgacttctgacatcctatgggactacaattatgtcctcccttcatggtacctagctacatttgctgggacacaaaaagtaccaagagttccctgaaaataagagcctctgttcagaccatcttctctacatggtctgctatgggcctctgcctggtgcatttgtacattatgaaaaaagaacatcatggggtatggcaagcagattctgtcttctcacgggccccagccttcccaggcaccagtttgtgagcagacactgtgagatgcactgtgaccaaggagaaagtgcgatgaaagaaggaggccctctgttgggtcagcgccagcctcaacctgccgaggagaggctgagagaacagggggagagaacagtcaccttcagttgaaacgagtgaagatgcttcaagttggaggccagctggagagtccaaccagcctgaaaagtggtcccgcccaacccagtgagtcttctttcccaaaaacagcatgggagcagatgcagggattccaatgctctatcaaatttaaagagagaagggacggtctggcccagctgctaattttacaggtggacaaacaggcataaaaagggcaaggctacaaagaaagggggccccagcccagagctctgcccactcagatgccagaatagcatctttcatcttttctcacgcaacagtgctatcttttccatttttattttgagggagcagcgaaagaaacagatggccatgggtcatcccccgtctcagagaaacttcagatcagtcgggaaaaggtgaggaaaggttttctcgacacagaaggacaggcttaaactggttcctggcagctgtgtcagcgtctgaagcctgcagaagcccaagccaagctcttcacggtctcagggtcttggcacttgctgttcccccatggaacactcttgccctagcacgtgatgtggctgtctctgggcatcttccacatcaaaaatcaaatgcaaaacagcctcctcccttcttcagtcattctctatcataccaccttgtttatgcttgacgaggctgtttctcaaacgctttagttacattctaaaattgtttatttactcatttacttattttctgtcttcccactaccagcctaagtctaccagggcaggaagtgtgcatcccttttattcactagactcatcaaagagcctagtactttaactcttgagagcttgagggaaactctttaaatgctcatgaatgaatgaatgaaatagaatatgatgaagtgtcagaagcacaagatttggtatcagaggatgatgcatggcttggttatggcactttctttgtgactttggatgagtcagaagaaaatttctgagcctccacttcctcatctttaaaatgggaacaataatgatagcagcttgcatgtactgggaactatgtgctatgcaccgtgctagtccatttccatggattacctcattcaatcctcaaaagagccccatgagttaggtactgtcactatccacactttatgcaagatgaaaccaagagttaaataacatcacccaaatatcacagctgggaaatggccagagatattccgcaaagcattgcaacaggcaaattgccctgtaaatccatcaaagtgggggtgaggtcacattctgagagtcacagactagcaggtggtagaagaaaattctgagattggttcatctcaaagcccagcttggctcaagctaagttatattcacagagccagggggctaaacccaggtccttcccattcagtcaggtgtgtgtgaggccccttcctcagtaataagttataatcagctgtcttcaggtgctatctcttgagtggtccctgatggtgagcaggcagagactcctagcaaacatggatgcctggcttgtccccggtatgaatgcccaagtcctgtcatctctctacccctttccagcacttcctttcatcacagccacatccttgagttctgactggctaaaatcttgcttcagttcaccatgtcccccatcacacttcattcccgtagcatcaaaagtggtaatgccacccagagcccatatcacatagaagacaggagatgaaatctgcatggtgggccctcctcagtttcttcatccatgaaatgtggataataatagtacattgttgggagaaaagctgagtgttgggagaagctgaggcagggcttgcatgtctgacatactgtaaaagagtcttggaacatgtccggggtccagggtctaaaacccctcgtggcctttggaacaccaagctctgtgctaaagggtagaagcctaccctgaagcaccataacctaagcccagggcataaaacccctcgtggcttggaaagaatccagggctcaaggcataaaacccctcgtggcctctggaatgtgtctagacttgctggctccttgctctcccaggactgattgtatcttgagttaaaagaacctgctctccactatctcaagcagcagaacatgttccatatgctgcaaaggaaatgctaagccgtcacagctgtagatcatgcacttgccctttcgacccccacattctcaacacctgtttctctgtttgatcaccaataaatagtctgggcttccagagcttggggtctttgcagcctccatacttgcgttggccccctggacacactttctctctcaaactgtcttttctcattcctctgactccaccggacttcatcaccctcacgacctggtgttgggtctgtccaccccaaaagtacattcctgataagctgtcatgaggattaaataacatgtaagacagcacagtgcctggcacatagcaagctctcaacaaacattagtaattattactcccatcacagaatgtcatacacacacacacacccttctttataaacataaatttaaaagaagaaatgaaacacttgtgtatgtccacactgataaatttctacacttagatactcaatgacatatacttaacacccgcaatcccatacctgtctctgtggaagctcctggcacgtcccccacggtctctgtcttgtttagggaaccagtttgtgtcttctgttctggcttgccacgattgctagaatacatcgacttgaccacagtggtagcacagttctgtgtaagaaacaccaaccccacaagacccccatgggctgcttcatgccccctcctctctgggtgtcactcctcctgccccattaaggaaaggaagcagaaaaataaatagagaaaccaatgtctttctccaaatcaggaagttttaacacagagtacagcaaagtatgacctatgaactagaaacctagcctgcctcctgtttgtgtaaataaagttttattgaaacacagccatgtttatttgcctacatatcatctacggctgcttcccagctacagcagcagagttgagtagctgtgatggagaccacatggtctgtaaagactgaaatatttactatctagcctttgatggaaaaagtttactcattcttccttccaaaggcctgaaggcaatctaatagctgtcacccagggcatgcaggaaaccaggagatggatgacggcagcttatttttgctagtcccaaaagttgctaccactacaggaacatctggctttctaaaaacctcttcttctgaaagtgacttatttttaacatacaatttttttcagaggaaacaaaaaaaggaaaagaactaaggtccagagcctctgttggcaggcctcccccagcaagttccacttcctggaacagtgagtacactgtcctgatggctcaaggtcagtagagtcacatggtccacacatggctctctgtggaactctggagtgccctttgaccccactccacatctcagctccattagtgacctggcttaaagcagctcaggagagacagaagccaggtgctcccaccttggcccagtgaggatcagagggaggagaagacaccggtaatccccagaagagaacatcctgatgtcatgcaaagctttctcaagttctaccctgggaaaatcagcctttggtgcccactcaataatccggaaccattagatgccaggtactttccaaccactgccttattttgtccttagagaagccctgtgagttgttctttaggattcaagacaagattttgcaaaattggaacctgaggctcagagaggttaagtcacttctgcaaggctgcacagcttataaaggacagagtcgggattagaattactttcaacttgatcccaaagcacaaacctgctcaactttatgataatgtctcttgcatgaaattcccactcctccttattaccctcgctgaatttattcaacccatatctggatttcattcattaatgctagatcaagtgtctggtgtatgctagacattattctagctatcagggataaagcagtgattgaaagctatgacctctttctccatggagctcacatactagtaggggagatcaacaatgaaaacagggagagaagtaaagcaggtaaggggcccatctcggctcttgacatgacataatgccttgaagatgttaggcatgcaataaacatgtgcctaaggtgggtatggaaatggatccttattgagcagctaatctttgctaggcatcaggccagacattccatgtaatcttacttaatcttaacaaccatcttgtaatccaagaattaatcatcaccattttaaagataaataaactgaaaatccagcaagttaagaatccaatccatattccctacagttgtggattctgactgttttccttctccaaaagccatcatctttctgctgcaaaatgctatgcatgcagaagcccaaggaacatttaggactggctgacagatattggtttatgtacccagtttttataagtatattaacatttaattacatcaagtaaagactagggttccatacagtcaattaaactcgataatagcatccggcgttctataaatcaccaaactggtaattgtgtagataaaatattattgcggtctgagtattatcataagtacagttggttgtcagaagtcctctcaaaacagtgaagctttggcaatttagtctgtagttgccagttggactccgtgtaccttggccgttaagtgtgcattaattgtaggatggaaggtttttaaggacagaatacaaagaagcctcaactaagctaaagctgaaattatttggataccaagattgggtcaagccaaagggaatggtggattcagcatgttttgagatcacaaggatggtgatggtgtcttgggtagatgtaattacagctgaactagcacgtcacccagttaaatcagcaagccttctgctcttcctctctaatgttgacactttgtttccctggataggtgaatctcaccaagaaggaagtgtacacaaaggagaagcaggcactctcctagcaattacaggaagtggtctttgatgaatttcaaagagagatggtagggcagtcactaaggttcctaagcaaaaaaacagaccatctacctcaaagctgtctcatctctacctctctgatgcccgggagttcatgtgcatccaggatacataaacatgtttctcctctttggaacaagcactcagcaacttccagctctacgcacatttttttttaatctgcaaaggaccaatgcagatgatcctatgagagcagcctctgccaacctcactccacctcaggctaaaactctttgaaacagaagtgaacttctaacgaagctgcaacttgctaaatcacatagtaactcggggcctgacaggacaccacaggcaggtggtcttgaagattgaggatttgcctgagagaaaggagtcctgcatcaaagacttggctcttcctccagctggttgcatgaccttggctgagtcactttctgtttaaaatggatctggctggaagctcttgacagtctaccacagtaccaaggcaatgcccataacaacagtggaagaggtgaaaaccttccacagaattgaaaacaaggtcttgatacgggaagggggcagggaagtgctgggaagagaagggtgggtccctggctagggctccaccccatggacctaggtgaggacaggcatttctgttttcatgcccaaatgttgcacttcccaagaccaccctggcccaccacacccccatcctgtgcctataaaaaccccgagactccagaaataacaccacacatctacaaccatctgatctttgacaaacctgacagaaacaagaaatggggaaaggatcccctatttaataaatggtgctgggaaaactggctagccatatgtagaaagctgaaactggatcccttccttacatcttatacaaaaattaattcaagatggattaaagacttaaatgttagacctaaaaccataaaaaccctagaagaaaacctaggcaataccattcaggacataggcatgggcaaggacttcatgactgaaacaccaaaagcaatggcaacaaaagccaaaatagacaaatgggatctaattaaactaaagagcttctggacagcaaaagaaactaccatcagagtgaacaggcacctacagaatgggagaaaattttcacaatctacccatctgacaaagggctaatatccagaatctaaaaagaactcaaacaaatttacaagaaaataacaaacaaccccatcaaaaagtggccaaaggatatggccagacacttatcaaaagaagacatctatgcagccaacagacacatgaaaaaatgctcatcatcactggtcatcagagaaatgcaaatcaaaaccacaatgacataccatctcacaccagttagaatggccatcattaaaaagtcgggaaacaacagatgccggagaggatgtggagaaataggaacacttttacactgttggtgggagtgtaaattagttcaaccattgtggaagacagtgtggcgattcctcaaggatctagaactagaaataccatttgacccagccatcccattactgggtacatacccagaggattataaatcatgctactataaagacacatgcacacatatgtttattgtggcactattcgcaatagcaaagacttgaaaccaacccaaatgtccatcaatgatagactggattaagaaactgtggcacatatacaccatggaatactatgcagccataaaaaaggatgagttcatgtcctttgtagggtcatggatgaagctagaaaccatcattctcagcaaattaacacaggaacagaaaaccaaacaccgcatactctcactcataggtgggaattgaacaatgagatcatttggacacagagcagggaacatcacacactggggcctgtcggggggtagggggctgggggagggacagcattaggagaaatacctaatgtaaatgatgagttgatgggtgcagcaaaccaacaaggcacatgtatacctatgtatcgaacctgcacgttgtgcacatacttaaagtatatatatataaaaaaaagaaccaaaacaaaaacaaaaacccgagaccacagcaggcagaaacacacaagctgctggacgtccagaggaacacatcagcagaagaacccacaagcgtctggacatcaagaggaacacatcagaggaagaagacacaagtagctggacgtcaaaaggagcatgctggcagaagaccacactggcagacaccagcagatgctggaggctgaccgtcaaaatgacacagaatttggccggggcggtcagaggggagcacagccgctgagtggcccggctccagggggaaagccacgttcccactccatctccctcatggctccctcatctgctgaaagctacttccactcaataaaaccttgcactttttctccaagcccacatgtgatccgattcttccagtatatcaaggcaagaaactctcaggatacagaaagccctctgtccttgcaataaggcagggggtctagttgagctgactaacacaagccacctacagatggctaaactaaaagagcacatgcccactgaggcttcagttgtaaacattcatccctagatgctgctgtgagaccagagccctacagcctacccatctgcatgcttccctagaggtttgagcagcagggcactgaagaagtgagccacacccccatcacacaccctgtgagggggacaggggaacttttcccgtttcagtctcacaataaaactattcacctgcatctggaggaaactaaaatggattttaaaatgcaaatgacagactacctctgttacactcttgttctaatctggaaaaaaaaaaatgtgaaacctcatctgcctggaattaactagataaaccatgtgtttcctccatactgtcaacccccaagttcaaaattaccgcatctaacaaagagcacaccatgtcacaggccccctaatataacacctggtttaggcaccgggagtctctctcttccttacaacctactacctacagtcagaaaatgtaacagtgaggggaaaaaataagaattattatgagtaaatgaaaaaaatgaatacagtaggaaagaaaaagaaatcatcataaacatttaaaaagaagacctctgaaaatgatccactgaaagaacccgaagaacgctttaaatagtgtgaagtgtcctaaataggagacaaagagatgcagccctttgtgaaacaagaagagaaagccacacagagaccccaataacctgaaaaaacaatcggattaggagacagatccgtgtgttcataaaggatctcagggaaagtaaaaatgcaaaaagcagaatccatatcagtgtatcaaaccctccaacctcaacgttgactggaatgaagaaaaggaagcaaaagtaacaaagaaaccacaaacattgaagtttttttttaatgtttttctcattgacttggaggacgcgacacaatttgggcccacccaaaatgccacgaatttatacactacacaactcgttcttaacagagttgtacagtatgagatgaagtggaggaatttcggaaaacccagcagtatccgccagctggcatgtcaggggccgtggcgtgagagagctacaaaaaagatgaaggatgctcaacctgggtgtccttcagcctcttgcatcaacagtacttgaagtcattagtttgttattgtccttgtttcccatctaattcagatctctcagaggccctgggaacttctctcatccaggagagccccataactggaagggtacaagtgggggcagagtgaaaatagtaagaaatggcaaaatgattttccaggtgccccaaaacagcccaccaaacagaaataaaccatcatgattgtgcaactttcctccaggggctgacacaccctgaagccaatgaaagagaagttcctgggtaccccaccaagcataagaacccttcgggaagaggtaacagtctgaaagtcggtgaagtactggtggcagagtagccccccatgtcttctagggctccagccattaggagctgcaactgcgctaaggcagaaagaagcaaagctcacatcccaaacacgacccaccgggaaggcagcaagagaacgggggataagcatcttgaagacactgatgtccagcccacgaccatgtgaccttggacaagtcacttaacctctcccagtttcaatttcctcatctaagaagataataataatagccacccagaagcacgtctgaatttttatagcccgaatcttaaacaccttagggagggagcattctttaaggaaaatagtacaaacttagaaaagagactatctgacatgagaaaataattcacaacaaataataaattcctaacaaccagcaaataccacaaacactgtacaatccagaaaaataatatttttataaattatctttctaacaatattctcccctacatttctggacatattttctgggatgatctctttatgacaataattttgcaatatcattttttatagagagactagaaacttcagtgtcccctctagcaggttaatatttattattattaatatttttaaagtctccttcaagttcacaagtcattgtttatatagagtcatgtaaactttaaggctgtggtcaagtttggagaaatctctatcaaatttctttcatgtgtatgctatactatttcagggtattataagtgtgattgtccactgagtaatcaaatagtctttgaattcatgacattaggcatatttatggaagccatttccacactagggtagctagtattggtttaattatacacaaggaaatacaggatggtgccagggctcatgtttataatcccagcactttgagaggccaaggcaggagaatcacttgaggccaggagttagagaccagcctgggcaacatagcagatcccatctataaacaaaataaaaaattagctgggagtggtggcatgtacctgtagtcccagccacttgggaagctgaggtggaaggatcacttgaacccaggagtttgaggcctcagtgagcgatgatcttgccactgcacttcagtctgggcgacagagcaagaccctgtctctaaaagtaagtaaatacatacatatatacatacatacataaaagagaaatatctatgtgtgtatgtatcctatcatctatcattgctctattgatctagctatctatattctattaacccaagcttgacttcaacttctgcttacccagatttctaaaatgccctgcatactccaaaactgccacctcccacccctcacccctaaaaggacattatgatgaaggggaagttggagtggaatcataatagtcttcgccaattgtggttaaaattatcttacttctaatcattttataaaatatacaactatctgaacatattgcacacagcccttcctcgggccttggaagggtaacacaatggggatagactgtgaagcttaagcttcgtagctccacaggtacagggctttgaaattctcccacagatacacaagagggtgtggcatgtgcctggctctggcagtgatggatgtcctcatctgtagccatgccacatgtctgatggaggcacctgagacccatccagcatttaccaacctctactgcacctgtaaagctgtgtgtctcacctttctaacatcagacctcaggcaggagatgggctgggccttgggggaccagatcaccattattcacttgctttcacacaagcatgttggatttcaccttggggagaaaaaacattcaacaaccgggccagaaaacactgctattgtcgacagctctagcaaaacactgtaattcagacttttcctagtttgttaaaatttgctgatgccaatcggtatttcagagtctcgttaattttctcattactctcctattcttttctccctagcagcttcttccacgcctcaatcacacctttgaatcttttacagggacaccataaagctggttactttatccccttccatccctgcagcttgtttggctgcagatatatttcacatgaagccccaggccacatcagatgacagcccaaaccgcagcccccaaagaccatccagaaatcctgctgcacgcttgggagttcaaaactgttttgattcggattcacaagaatcaccctgatttcctcctatgagtttttacataaatttctcaccgcagcttctctacaaccctggaaggctcctccaggcaagccctgagaatagagctgtgccgcggttggccatatccatgtaccaggaatttgttgggaaacagcaaccagctcagtggtagaatcaatgaaaatttttatatcctcctttatcatttcctattttggggggaaaaactatgtaagatagggaaactctgttgtctagccattactgaaatcttaggagaaatgatgttgacaggatgagcttaaaggaaattcattccactggacttcccccaagtaatcgacagctggctatggggtcaaactaaacagatcactgagagtcacatacttgatctcagccatacattgctgtgagcctctagggaacccctttttctccacgcagccttggtgcccacaagagcatcataagagacaaacacacaaaataagggtgaaatcaaggttgaggtgattacggaacacaaaatcttctttgaaatgactttcaaaagaacattgtattagtctgtttttatactgctataaagaactgcccaagaatgggtaatttataaaggacagaggtttaatggactcacaattcagcatggctggggaggcctcaaaaaacttataatcatggtggaaggcaaagaggaaacaaggcaccttcttcacaaggcagcaggaaggagaagtgccgagcaatgaggggaagagccccttataaaaccatcagatctcgtgagaacttgctcactatcaggagagcagcatgggggaaactgcccccatgattcaattacctccacctggtctctcccttgacacatggggattatggggattataagatgagatttgggtgaggtcacaaagcctaaccataggaaacactttttttttaaatcatggtgactctcttaagaatctaatatatttatcttatatgctttgtgtgtcttagtacacacacagacagacaaagacacatacaacctcatagaatttcttagaggaattcaagtaagatgccaaacatgtagaaccaagaaaaacgtctggcacattttaagagctaaatatatactagctattattattattaggaatacagtacctataaaatgtattcataatttaacaacacacattttaacaagccataactattgacagatattaactagtaattattctgattaccctaaagtgacaaatactccaaatgcctactggcaccagtgcatttgacagcattgcattttttggtgtagttaacatctggaaaatgtatacattatctaggggcatcctccatatatttatttatatataaatctatgcacatgaatctgtatgcatgcatatgtcaggtttattcatttcaatctaattgcaaaaataacacatttttctccaaataatttgaggaaaatttaaaaacacaatcccctctaaaccgcatttttccaggagttgccactgttcatactgtgatctatggcttttgagactttttttccaacaacagatatgcacatatattttccaaagaacatttggaaccagaatgaacataaatctttgcaacctgcttttaaagtacattacagtatcagaaatattttcctagtttactaaatgttcttctaaaacccaattttaatggttgccatcctgcatgctgttaatttactaacccaaatcctcttttcttttttttttttttttttgctttcaaattttactacttataaggcaaggtaataaaccctaggaaatatccacatttatttccttgggataagattctaaaagctgcacttctaaggtcaaagggcaagcacaaattatatatacagtcaaaccatcttccaggacagttgttgcaattaacactactatctgcaatgtataagactgttcattttccttgcatcctcactagtactaagtatcatcactgtttttaatcattgtcatttgtcattttaattggtgaactgcagaggcccattagtttaattttaacttatttgaatattaggtgaggttgaatgttttttataagttcaactggccatttggcatttcctcatttgtaaactgcctggttatgcccttcactcattttatgattggactatttatccattctaatttgtaagtgttcttaatttagtaaacacattaacttattatctacattttcagttataaacatttctctagtttcttttaacctcttaattatttttggtacatgtacattgttgagtataaatacaaatcatttcccactctggtagaaatgcctacatagagtatcagatacttgcgtatcatactacagaagaaataaatattcacctgtatcattcttgatccttttgttaaattatgaatacatttaaatattgacttcctctagaaataagtttaatgcatgacatagtgtaagaatctaactttattttactttttaaaacactttcactattgtttcagcatcattaaaattatccatctactcccggatgtcctatatgaaatgcttataaatacatggctctatttctgagctttctattctgttccactgatctatgtgcctaaatatatcagtatcaacatgttgtaattattatggatctgaacatggcataattaatgctagtgctagagactagctcaggaaacagacaacctgagtttaaatgcctatcctacctcttactacggatggccttgggaaagtttgccaatgtctctgtgccttagtctctccatcagtaaaatagaaacaatcatctcttctttacaaaattgctgtaaaaattaaaacgactgtatggatacaaagtgcttaaaaaggtaccttacacagaatgaacactgaataaatgttatgctatatccatttctgaggagtgttataacaaagtgccacagactgggtggcttaaacgacagaaaggtattatcttacagttctggaagctagaagctggaaatcaatgtgtcagcaggattgaccccttctgagggagaagagggagaatctgttccatgtctctcccctggctttgggtggtttgctggcaatatttggcattccctggcttgaagatgtatcactccaatccttcatctttcctgcatctccacacattgtcttttctgtctccctgcctaattttttttttgtttttacaaggataccaatcatactgtatcagggtccaccctaaggacctcatcttaagttgattaaatcttcaaagacattatttccaaataaggtcacattctgagttactggggattaggacttcaaaataacttcttctgaggacacaattcaacccacaacagccattatttatggtaccttttcaagattgaatgatgaggttatcagacaacttagtcttaatagcaaattctatgccaatatttctaatttttcatgacaaatgatgacattaactttagattgagaaaagctgtttgtttatgtttagtatgataagaactcatctttcaatttccagttgtcccaagcattgggggtgttgggttgcttgctaattttaaaccagaatgagtgtgagatttttcaaaagcctttttgagactattgaactcatcatatggttttctattttttatttatccatgtaatacatattaattcattccctaatgttgaattttccttacaattgtaagataaatcctattgtagcatggtatattactcctttaacacaacactggagtagatttgtgtgttttgttgtttggttttgtttttcacagctacatccatcttcacttgtgtagttgtcctctatagtcccttgacaaatctcacaatcaaattgtctttgctttctcaggaaagggatttgtggatcagccctaggtgatcctcttcaatcactgtatctcctagaaatgactaagtatgaggcaaaagggtggtatcttttccagttcccaccctactcatgtcaggtttttatattttggtcatgttggttcatgtcaaggaaggtggggtgattagttgcctgtgctcaaatccccctctttcccagaagccgggacctattgcacatatttgtatgaatgactcatcaaagcaatcccagtggtctccacagtccgtggatccttaaaacccaattcaaaaaccaaccacatttgcatccatacaataaaatactactcagcaataaaaacgaatgacctattgacgcttgcaacaatatggccaagcatcaaatgatttatgttaactgaaagaagccagattcaaaggctacagaatgcatggttctatttatctgacatcctggaacagccaaaactagaggaaacacaaacggatcagtgcttatcaggagttgagggtgagggaaggatttgacaacaaaggaacagcatgggagaatttggtcgataattgaaaaaacacattatcaatacataagggataagtggataggggtatgggtgaaacaaaattggccatgaggtgttaattgctgaagctgggcaataagggcttattatgttattctgtaaaaaatccttaaaagtgtacagttaaaaaaaaaaaaaatacataccaaacattgcacccaatctgtgtgaggcaggggcttggaaaacatgacgctagggtaccctttaccattccaattttctaaacccttatccctctccaaatggcctacttcataaatatgctatccaatgattaataaaatgaaagctaaggagggaaaaagatataattaaggaagcagtcccaactttggccatctaaagtaaaatgactgtgctaatgtcgttgttaatgtttcgtggtcagagcaaagagaaaatcactccccagattacagcttttgctattttagggcctctctgggagccccactgcaatgcacaatgcggttcgaaatctgagcttccattaaagagtatgtttgaggcacggcttagagaaccccacaggaagactgcttagcctctcagaaaatgccctcaggcctggccaggctataggtaaggcctgtgggtccctccctgacagtagctggcccccagcaagctgccttctgatctgcataagggtccctgtgggggcctggctgctctcctggaccgggaaagactgcacagccacgtaatctacgtgcatcttcagagaggaccagatttgcccacacattctgtcccacacagctcagaggcatagaggcagccaccttaagagtactcctcacagctggggacaggtgaatcacggctactcagttgattggttatctatctatctatctgtctatcatttacctatttattttcagaaagggtctcactctgtcacccaggctgtagtgcaacctctcaaactcggccaatcctccaatcttagcctcctgagtagctgggactacaggagcacaccaccacacacagctaattttttgtattttttttttctgtagatacagggttttgccatgttgcccaggctggtcttgagctcctgggctcaagcgatcctcctgcgtcagtctccccgagagttctgggattacaggcgtgagtcaccatgcccggcccgctattgtttttaaatgccatttccctcatgagtgcccaattgttgttgttgttgttgttgtttttattattattattatactttaagttttagggtacaggtgcacaatgtgcaggttagttacatatgtatacatgtgccatgttggtgtgctgtacccattaactcatcatttagcattaggtatatcttttaatgctatccctcctccctccccccaccccacaacagtccccggtgtgtgatgttccccttcctgtgtccatgtgttctcattgttcaattcccacctatgagtgagaacatgcagtgtttggttttatgtccttgcgatagtttactgagaatgatggtttccagtttcatccatgtccctacaaaggacatgaactcatcactttttatggctgcatagtattccatggtgtatatgtgccacattttcttaatccagtctatcgttcttggacatttaggttggttccaagtctttgctattgtgaatagtgccgctataaacatacatgtgcatgtgtctttatagcagcatgatttataatcctttgggtatatacccagtaatgggattgctgggttaaatgctatttctagttctagatccctgaggaatcgccacactgacttccacaatggttaaactagtttacagtcccaccaacagtgtaaaagtgttcctatttctccacatcctctccagcacctgttatttcctgactttttaatgatggccattctaactggtgtgagatggtatctcattgtggttttgatttgcatttctctgatggccagtgatggtgagcattttttcatgttttttttgattgcataaatgtcttcttttgagaagtgtctgttcatatcctttgcccacttcttgatggggttgtttttttcttgtaaatttgtttgagctcattgtagattctggatattagccctttgtcagatgagtaggttgcaaaaattttctgccattctgtaggttgcctgttcactctgatgctagtttcttttgctgtgcagaagctctttagtttaatgagatcccatttgtctattttggcttttgttgccactgcttttggtgttttagacatgaagtccttgcccatgcctatatcctgaatggtactgcctaggttttcttctagggtttttatggttttaggtctaacatttaagtctttaatccatcttgaattaatttttgtataaggtgtaaggaagggatccagtttcagctttctacatatggctagccagttttcccagcaccatttattaaatagcaaatcctttccccattgcttgtttttgtcaggtttgtcaaagatcagatagttgtagctatgcggcattatttctgagggctctgttctgttccattggtctatatctctgttttggtaccagtaccatgctgttttggttactgtagtcttgtagtatagtttgaagtcaggtagcgcgatgcctccagctttgttcttttggcttaggattgacttggcgatgcgggctcttttttggttccatatgaactttaaagtagttttttccaattctgtgaagaaagtcattggtagcttcatggggatggcattgaatctataaattacattgggcagtatggccattttcacgatattgattcttcctacccatgagcattgttatcaaaggaaaatctcaggaaaattgaacaaccagtgaaatagcattgccccctatcttcccatcaacctagaacagaagggaactcacctgtaccttggtacttgagagatgagacagctactactgcccccattttactgataaaaaaacaaagtgcctccagaagtcataactagtgaggaatgagcgaaagttgaggtgagggatggagatagttagctcttctccttcattctccatctcatacaaaaggaacttccgctgctgacactggagagggaagtgttaaaaacctttactctttcctccctgaaggtgtaggacttgctcatttgactgataaagcttgccattccttgggctaaatgtactagcggtcgcgtgtcccagaggtgcatctctctgatcctgcaacacttttgcccacctgagctcaggtgcctaggtcctctgatctgctctttcatctccttctgagttcttgtcttctttcagttcaggggcagtaagagctcacttggaaaatgatggtccagggccatcattttctatcctggagaccagtagtgagaggtcaaccagtgccatctgttcatgcaacacagtgggtgggtaagtcagggcagagctgctgttggcagggttgaacttcacccaagccctgtgctcctggttaagaaatccccccatctccaggtaacagcttacggcaaagaaccacctttccctgtacagcttagataagacttgtggatgatcctttaacaaggccagacacaggccctccaaattcctattctttgtctcagaaatgattagctgcactgtttgtctacattaaccaatctgactggatcaaattttagtcaggcttcactccttcccatgggccccttctaaggatttgctgaccacaaagaacatttccagtttggttcatcgatcaagccacctgctctcctcacccacgctgatcctgtccccattgcaaccaccccccttttcccattgcaatcattcccgttgataaaatctttccttactactgtacaaacttgcacatttttttgacactgtctctagtttagaaggaagggagacaaagaccaactttcatttgagagttcaaccgtttatgaggcatgctgcaatcaggggtcagacagtgcttgcccagatgaaaaggactggtggtactagcttcgagttttgtgtgtgtgtgttctgtcagatctccacagaaaagatgggcaaaaagctgaatctgggtgccctaaacacagcctgtctccctcttctagtttctttccactcctcaacaccagaagaggccctctcagctcatgccgcaccacctatgcaactcactaaacagtaaaacagattttgcatagcaaaggacatcagcttctcccacgtctcagggactaagggccaacaccaggaggcaaagcaggcaaatgaaagctcatttctctgctacaaaatgaaacacaaaacactcctggggaagagtccttctctgtaggcaccagggacacccatcacccctccagcctggggatcccccagagatggcataaagggacacccatttatttggtcgggcagctgggaattttaatggaacatcttaggaaacgttactacttggggctttgggctgggggagagctagatggactctttgtacttcctcttcttgaagctttgctctccttactccattgagtatggttgtgctctgtaatctgagcttcctttgaggactggaacacaggtctacagatggatgacaatgggattatgagacccagcctcaaagacatgagagtgatggctggtctgtggggctgccccagagatgccagctggaaaacgctaagagcaggtggccaagtccttaacaacttttccaaaaacaggggttctatgtgattccgacctggcaagcatagattcacatccataaaacattttgcagcacagactatgtgccaagcctgtgccaagtgttttgcaaatattatctcattgtatccccactaccaaaaagaaaaatcatttgaattaaagttacagagacttaatacagaagcagaaacctttaaaccttgtagacaagtaagaagaccttcgaattccccaccctcaaatatagattcctgtccattcatttacttacgaatgttccttttgttcattcttttagtgtagttcagtgaattttaaactgtagtgtgcatgagatttattcaacaaaacatattttatcatgggtgccataagagatttcctaaggttaatttggacaatacgcacttcccagcttaactgttgacttcagaggccaatccccgcctagaattctagtccactttgttacaacttctgatcatcacatcaaagcggggtggtgagccctggtacaggtggggcagtttgcattttgaatgtcctagatgatcaagaacatattaaaagaagctctttggctgtccctatcacttgcaatttaaggatgaataaagtgaatgagttgagtcagagacaagaacaaaaaataagcgaatggcttagcaacttgtgggagatccttgccacggaatattacccagcatgaactattaatatacgcaacaagatgaatgaatctcataaagcatagactaactgaaaaagtcaagcacaaaagactatatgccatattattccttttatataaagttatagagactgaaaaactgtagtatcaaaaagcagataagtggtcgcctggagcagggagttggcagggagggaagttgaggggagggtgataaaaagcaaaagggaagagagggagagaaggaaggggagggactctatatcttgatgggatggtggttacatgattgtgtacaatgaccaaaattcactatgctgtagccttacattttaaagtctaaaaataataccttaatacttttttttttccaagaggagaggaaaaaaagtcatggtcacatacatacaaaaagattagaacactttattccaaacaaaacactattgagcaatttgggtcaaaagaatgcacaaagcagaatcacattcttcctttcaaatttctcctttcacatttgtgaaagaagaggaaaaagaaaaaacaaactgcagcatacatttgaatttttcctttcagagaggggctctaatcagtgcagagaactgggtaacaagtaagaccaagagggtttaattaaactgagcaatcattaaactggatttaagagtgcttgtgtttgcaaaacaacaaaatatttacagacattttcttcatccccttcattagtttcagactccacaggaaatatggaggttgggaacaggtcctaatgagatcatgcaaattttaactactgaggttagcctggcaaagagacagcacggcaaaatgctcatgatgaaatgttaagtgaggaaagcaggatagaaaatgagcttgcactaacattatgagtgattccgataattataagcatggtagggggatgacaagcaggggctggacattaaaatattctatcagtgatggtacaagagcgatggaattaggggattattttcatctctgttttccaaaatttctgaaatatatgagtgtattacttttatttctttcaaaataagaaggtacactaaagcaagaccatcacttgaggccaggagtccaagacaagcctgggcaacatagtgagatacctacagaaaatgtagacttccacacagtgagatctctataaaaatgtagatctcaacatagtgagatctctacaaaaaatgttaaaagttagctgggcacgatggcatccacctgtagtcctagctactcaggaggctgaggtaggaggattgctggagcccagtaactggaggctgcagtgagctagcattgcaccactgcacttcagtctgggcaacagagcaaatccctgtctctaaaataaaaacaacacaaaaattttctaaaatctaatttagacatctaacagtcatacatgttcactatctctttgctgtgcctcagaacgagacaaaaggggaaggaattctgtaatctatagcggcagcatccgatctcagaacactgcaccttcactcactccaatcagggtcttgctgccactgggacagtgaaactgccctcctcaagaccacccatgaccctcatgtagctgagtccagaggtgaattcttggccctcatcaaacttgcttcatcaacagggttaacagcattgatggctccctcctcctttctcagattccacacagcgttctctcttgcttgtcttccacctactcttttgagatggagtctcgctgtgtcacccaggctggagtgcagtggcatgatctcagctcactgcaacctctgcctcccgggttcaagcaattcttctgtctctgcctcccgagtagctgggactacaggcgtgtaccaccacacctagctaatttttgtatttttagtagagatggggtttcgctatattggccaggctgatctcaaactcctgacctcgtgatccacccaccttggcctcccaaagtactgagactacagttgtgagccaccgcgcctggccctccacctactctttctcagcctccatgctggactctctccctcatcttgatacctacctggtggagtgcttaggctcagtccttgaatttcttctcttctaagtcccaaccctgtgcatctcatctaagcccacaacttgaaatagtatccatacactgactactcccaatttcacatccttattctacacctctctcctggactcaggcctgtatatctaactgcctagttgatgtatcgacctggatgtccagtagacatctcaagtctcacatgcccaaagccaatatcgactactcttctccaaacccgttcctctcaatcttcccttgcttggtgcctcagcatcccttgtaggtttccttagtcttgcccacaccactaacagttacttcattcaattctcttcgttacacacttttgagtagaattctatgtcctacaggaatcttgattgtgttccatctaggatgatgcccttggagggcgagtcctcccctgctgcttccatctgccccagaagtcacacctcagcctagattagctgagggtcactcaaacgcactgtagtctgtaatgcccttcatgcccttatctttgtatgcaggtgaagcatagaccacccttaccctgctgtctcctcacccttggaaatggagttcaagtatcaagcctccctcaggaaaatcttccctgaccatcgctcccaccccaagctaagatggcatcccacccctgtggttcccaacacttcactcatggctactttgcgaatggtcttatagcccatctttgtagacacatgaagctccatgatgaatttagggaggcccttcagcactccacccctgccccatcacacctgctggtgccaattcatacctgtaggagagccagtcacacctgcagcatgttcagcccctgcacctggagaaaaaacctagcaatccagaactttaaaggtcacttccaaggacttctgggttcacaggtgacataaataagcaaagccacagattgggtaggatgttcaatgaaccaaagaacacaaatcctatctgaaggcatccaaaagcaatttttaaagaacactgtatactcagaagaagaagacaatctgtgcattgatctgggctcatggtccgtgaatttgcaatctctaagccaaatggccacaaagtacctaaatgtgcaagacctcgcagattaatactgaatgaaggcctcctgacaggaaatgtctgcacattactttccaggtgacagattggcagataaagcccacgcgccactgtctaagtgacaacacacttttcacacgtatcttctcagtcatcctcatcatagccccaggagacaagttcattattatctctattttgcctttaagaaaaccagagcctgaacagggcagatgacttaacaaggtcacacaatgaggatctgaaagagccagaagccctggcaccagtcccaggtactccacgtgcactgctgggccagtggatgcttcacaacctgaaggatggccagggcctcttgggccagcagtgtccagcgtcatcaataccctatccacttcaagatgaatgggacatttttttcttttcttttttttttccttaagacagagttttgctctgttgcccagcaggctagagtgcagcagtgtgatctcagctcactgcagccttcacctcctgggttcaaacgattctcgtgcctcagcctccccagtagctgggattacaggcatgtgccaccatgcctggctaatttttggtatttttagtatttttagtagagatggggttttgccatgttggccaagctggtctcgaactcctaccctcaaatgatccacccacctcggcttcccaaaatgctgggattacaagcatttgctaccatgtccggccagatggcacattcttaatacatgctatgaactctcacaagaattcccatatcatgacttttataacctgccttttaacccttccatttaaaaaaaaaattatagcatgtgctacaaagccctggatgatctttgggtttaaagcagcatgcagctagctaggaaggccatggcatttgtgtgtaaaacagccttctattctggtaatggatgcagccgcggtctgataagcaggctgtgcagcattcactagcatctgaggccagcattcaccagcattgtgaacctcgggaagaaaactcaaacaacctgatgtccaacagtactcctataaggagcaaaattggtgagaggagcccacacttttcctaaaccccatacaaacatctctatctctgccatgatggcttaagcgtaagtgaaatcactttgactcacatcctcaaggtgaagaaagctgagctcacacagaacggctaatatgtgcacagaacatcacagctggcaaatatcccgatccgtacatcaatccccaaaaccagctgctgttaacctcacttttcagataaggaaatggggttgagagagattagatgagttggcaaaggtgagtggagatttgatcacaggtcagctggattcacaaatctgtgtacttagggcctcatctgtggttcccaaatttcactggtcatgtacatcacctgggagcttgttaaacgcagattcttgggctgtgctccagggactctgattcaatagttcaggggttggacttgagcatccatttttaaagagccttccaagtgaatctgatgcaggtggcgcattgtccacagtgtgagaattactgcggctgcattgagcctttcaaaagagagaagcgccatcctaaatgaaaaccttaaagccacaaatgatgagaatcaactcccagaagcattcccgggtctgtgagcacagtctttgcagaaatgctggcttttaggcatgcttcctaaactctctcactcctcatgacacaagcttttccaaatgctagtagcacctgtactaatatttagttaatattttttaatatgtcatttttcttaacttactttaaaaggaaactccgtatcactaccaaaatgaaaacctggtctcatttgctataaacacataatgaggctaaaaacaaaattaacaaaaacaaaaacataagtaaatgttggctagatattgttgctcccctagggttctgaccctagaacatggttcctcctagggaaaaatgagcatttgtaagtgttggaagggcaaggagtgatagaagctctaaaactcagaggctctttttatataaagaggtattagaaaagaaatgaagcattttctccatggaattcaatgctcatggatgccctgcccacacactacaaaaaattccatgaaccaccagtaatgtcccatatttcgggtgtcattggcttgaggcagtgttttcaagacttgagggtgaatcaaaatcacctggagaatcattcagattgccaggccctgcccccttgggtttctgattcagtgggtccggggaggggcctgagaatctgcatgtctagcaagtttccaggtgaggcagatgcttctggtccagggccatgccttgagagaattcagagcagctgaagaaaagagggcttcattccctggcactctctgatacctacaaggagctgtcaactgcacatgagtaccttctggtactgcacagtccctttgcagatttccgaccccagacattcccagctccatataaggtctttatcaatcacttcactccaggactcttctggaagccccctctaagaggggctagaccctgccaggtaaagcttttagatgggccgtcccctctcagggggtgtaggcaggaagttgcccactgactcggggctgcctcaacagaccaggccagcctgtgggtctgacctgcagagggccatatcccaccttcagacctgttgcctctatgcagcaggctctgcacctgcctgaggggtcatttctggtgggccctctctccctgaccaagacttagccttgctctgatgtcaagcctccctgcatccacccctctctcctgttctccatcctggactaccccagagccctgatactgccctctcccaggtcacaggccccaacaatgggctgcactagctctgagcttctccccagcaggtttgagtagcaaataataaatattttttttctaagcaactcttagtgcaattcaccccactgtgccttatgtttgaaggagcttatagcaatcctcaagggatccaggacgacacgggggacataatttagaggggacagatattcctccaccagaagtactttccagagaatctggggccaagactctggctgtgccctctggtgggatgacttccctgagcagagaatgcatagagtgcatcagagccacacacgttccagggtccatagagctaggttaaaatcccagcctctgcttcctccccgtgtgcccaaggacctgtttctgaacctctccatgtctcatttcttcatgtgcaatacagaggaaatcatatttgcctgcatgattgttgtggggatgcaattaaataatacacgtcaagcctcagcaagggggcagccaggcttacaatgcatccccaagaaaggacggcagctgccacaaatgctgccatcattattactgatggagcagccacccagatgggggtcacttcaactcctgctccaggccatcccagagatggctattaccagggaaaggatgtttccctgctggcacacacacactcattcaagatctcagcagccatagaagctaaaacaacatgggttgggatgtgcaggtggggttgtaaggttgctcttgatgtgactttcgatgtccaccaaggaaaacctgagggtgcaggaaggaataaacaaatccccttcatccaggacttcccatttgccctcaggagtaaggcaggtgttggcagctcccagagctgaagccactgcctcataagttaatgggaagagcaaaaggcaagacctgcttaaggggaccagcagaaagattgtagaaaaaaggggggctgggtgtggtggtgcacgcctgtaatcccagcactttgggaggctgaggcgggtggatcacctgaggtcaggatttggcgaccagcctgactaacatggtgaaaccccgtctctactaaatacaaaaaaattagacaggcgtagtggcgcatgcccgtaatccaagctacttgggagactgagacaagagaatcgcttctacctgggaggcagagggtgtagtgagccaggatcgcatcactgcactccagcctgggcaacaagaatgaaactccatcaaaaagaagaaagaaaagcaagaaagaaaagaaaggaaagggaaagggaaggggaaggaaaaaaggaaagggagctactcatggtggtgtggtagacccacgcctgcagtcaaacagaccagagttcacagcccagcaggtcactcaccatcagcatgcaagtccacgtgggacttcacctccaaagggctctgtttcctcttctgtggcccaggtatggtacagtgaactgagctgtcaggggcattaactaaaattccaataatacaaacagacgcttcctaattaggcatgtaggttgtacttagaccactatgtattatttctcctcattttacagagagatgaagtaacttgctcaaggtcacacagtcaacaaagaggagagctgggatctatacccatgcagcccacctccaagtcacatgctattggctgctaagcagcaccgtgtagcacagggcctgccatgcagcagttgtgagtacaaactgggacggggtaaggaggcagggaaggtgaaggttgctttcccaaagcctctatctggatgatgagatgggaagtgaatctgcagactcgattaatctaaacccaagctcattgcacaaggctctggttccctgccccaaatttaaacagctgctccttcaatgtagtggaacacaaatgtctgaagagctttgaattttaattatcacagtcctgatgacaatctgaatcaacagctgctcccagcaaggtggccctcagagatgcccagagaggggcagagggaggggacaggaggacacagtccagacaggacacagatgactgcatctgtctggggagccctgacacctgcagctgggagctgtgggatggacaaacaggttgaaatgcagtaagaggaggagggaatctctggggtgcacctgtccccttgccacagaacatgtgtgtctgtcatatgtcggggtgagtgacaatgcagagggagaatatcaggggccatggggagaccctaccatggtgtttctgatgagtaggccaggaggtgtgaatacaattgcccagggatccaagaaggggtcaaaaagaaaggtgtcagagggatggtcaaccaactaagaggtggcaaatgacagccctgctgtgacaataactcctatgttccaggtattggagcctccacccatccctacccaccttctcttctccaggtgagaaacgtccctcccttcctgcaactatttcagggaagacgctgccactcaacacaaaaacctgtccccaattgcttcaatgcaaaagagaaggacattccctccaagtactgaccctgtcagtcccatcttttgattcctgtcatatctaacacctttcttaccagtgacattgtctggataaccccaaactggaaatactagaataacaaaatggccaggagaacagaacataccccctgctttctttttggctttgcccatcaatttggcaagatggcagcagagcaggtactgcaggtaagacagtaagtcaccacaagatacccagaaggaagttcggacacatgtgtcatttctaacatccttagcatgcgagagtaattctctcctagggagatattttgtgccttacatgcaaggatactcagtgaagtgttctttacaagaatgcaaaaggaattcaaaaacaggagactaattaaataagttgtgatacactcacgcacttgaagtgcgtgtcattatcaataatttagagttccaaagagcccgaagtgtggagacatgtttacaataaaatgttaagtaataaagaaggacattaaatcatctgtcacatgtataattattccaattgcatttaaaggacagaggtgtataaatatgaataggaaaaaatacaactaaaagaaagtgcattaatcatctctgttcttatggatgggttttattttttctgtgtgcttcttcctattttcctaagttttctacagaaaatatgcattatatagagactttcaaatttattttcaatttaaaaattaataataaaagaggacagagaagttagggaaggagagatggtgttcagacaagggcttggagcccattttgaacaaacctggcctcattctcacagccctcagagtcaaaatagcggagaacattttccccttaaatcaattctgcaaaataatatttggtctgatgtttgtaggaatacaagcgtccttggctcctgcaagcgtggatcagacaaagcaactcaagaacccattcttgaaacctaaggattagcagttgccatgacaatgtgttagcaaacaatttattaagtacttgaaatttctcctccactattgattactaaatgggtattggaatgacccattactgcaagttctgtgtccccatctcagtgcctgatctggctgcaaatggtcccccaattaggacgcctggctgtaggcggctgccattcaaatgcttggttcccatccaagaaagcagtcatctgggaaaagtttaagcataatctctccggactagtttctgataaaggagggaagaggacagggaaaggacttggggagtgcttactgatgatgaggaagatgagccctgctttggaagcactgacaacttttgacagcagcctgcagcatcagtgagatggaaaaccacccaactgccctcctaggtccctcttctgatgccaacatcatcatcagctgagggggctggatccctgccactgcaggtctttgtttcagaagatttgggcccctggacattcagctccatatcattcattcaacaaaactccactaagagcacttgcaatgtgatggtaccaagcaagttccctaaatgcctcaagtcttctacccttgtgcacaattccctttactttttttacttatttctatttaattaatttttttttttaggaataggatcttgctctgctgtccaggctggagtgcagtggtacactgatagctcactgtaaccttaaactcctcagctcaagtgatcctcctgcctcagcctcccaagtagctaggactacaggcacaggccaccatgcctggctttttttttattttgcaaagacagggtcttactatgttgcccaggctggtcttgaactcgtagcctcatatgatcctcctgcctcggcctcccaaagtgctggaattacaggcatgagtcaccatgcccagaccctcatacataattcttgcgactttccctctctattatgaaacaaaactttataccatagctaccacatgtacctttcagcaagtagcaagatacagctgccaaataaatgagctgagcttatgataatagttgtagctggtatctagaatatagaagctttaaacaaacaacaacaacaaaaaactccttatctttatgctgtttagaccaatcaaccttcctccctcaaccccctccccatcttagccaccaccaccaccaccaatatccctggcagtgcattaactttgggtgccaagctctcagaacaggagtgggggtaaggagttagacttggacaagagcagggctaagatttgaattatatcccctaaatattcacgtgttgaagctctaacccccagtgtcactatatttaaaggtaggataagctcttaaaaggtaattaaggttgaatgaagtcataagggtggggtcctaatccaatgggattggtggagggtgagagatctctttctctttgtacacacacacttaggaaatgccaggtgaggacacatggagaatcaagtcaggaagaggcccctcaccagagagaaaactggccagaaccttgatgtgggacttccagactgtgagaaaataaatgcctgttgtttaagccacgcagtctatgcattttgtcatgacagcacaaggtgggagccactgcctcccaaatgctgaagaactagcacgttggctcagaagagaagtggagcctacgtgggcagagggtaaggagatggttctgctcagaatgaggtagaaccttctcatagaagaggcagagcaagcactgtgcaggcttctaggagacaagagagggagcgggtgagcataccatcactaatacatgccgctgcaagatcttccgcatcagatgggagttagatgagaggacacagcgtaggcgctcaacaagtatttgtcaaaggattgacacattttctttgtaactggacaccaggcatgcacagagacaacttacagctggttagcagtggggaggtaggtgccagagacatggctgataccagtaaaccctggaatgatagagtaaaggtcatgtccagtgattttcatttcagctacgtggcactaaaactcatcctgtcaacatgtgtcctgactgaatccatcccagtttgcacatgcaggctggaaaccactatctgaggccacagcagcctccttgtcccatgaatgccacacacgggcctggcttgggcgtgagtcctgcaagttcatcctgtcagagggtgagaaacagagaagcaggcccacacgaccaggggtgactatgagaacacagggctgtgcaggtgcctggggcacacagaaggcagggccccatccctgaggtgccaaagacgtaggttagaactgtggatcagggctagagccaagcctaggggaaatctggacctccccatgaggatcctggactcaaggaagctctgataaggcagacatcacttctcaagggggcatgtgcctggtctagaccaagagatcagggtctggctgcagcgcaggctgcacgtgaaggtgtcaggcctttaaaaggtggccggtgcttatcaaggacaaagaggacagagaactaagctgcagcccagaagaagagctccaaaagtcagaatggggtggtttctgaaggtctggctgagaagcaaggtggaggggtggtggtaagaaaggaagagagccttgtgtctcccaccctaggtagcatgtcatgttgtgcaccctggtcagcgtcaccctgctgacttgggtgaccaacgtgtcccagttttccaagaactttcccagtttctgcactggaagccctgaatcctggcaaaccacgacagctggtcaccccagcaccagcccaggctctggcgggggcttcactgagctcctggagaaggaccttaaaaatcctctatccaccctggacacctaggttacttctgaaacaaccgctccaccttcacgacctcctcaacaggcgtctactgcctttggaattggatgctattaatacaaagagaaaaatgcaaaatggcaagcagtaagtatacttcagagtgataatgaaacaagggtcctcatctttgcagcattggtcagcctgccctcattctcacctcttccaacctctcctctatagggatccttccaaaccccaaatctgaccaagcttgccctatttggacccatcccaggctccctgttgctctgagaacagaatctaatctttaatctggccctcaggctctttctggaccagactcccccatctgtctggcctctttcctgccttgcacccaacagccttgcacaacttttcaattcctccagcctggccaagctaattcatacctcagggcctttgcacaggccaaaccttcagccaagaatgtcttctgctcccctagatctttatcctgccacctaccaacccaatttatttgcctgctcagaaaggcctttatttatcctccctagttccctgcaaataggatcaatttggtctcccacagagcacaagccttcacttcactgtattgcaatttttaaatatatttacatgtttgtgggccacctcactcttccctgaaccctttgataacaaggactggaatctaactatgtttttccagtcccgagcatggtgccgggcacaaagtaggcatacagtgagtgtttcctggtctattgattgattgattgactaaactcacctcccccaaacccttcaatgtgagaatacattttcttcaaagtttttagccattataaatgacagacaagatgtctctttgaatttccaaacgcttatctcaaagcttttagttttgtctaccagctcatgccaccaaccggatgagcctcagcaaggttcctgtcaaagcatccctctttttgttgatttactttaaaatgcaactcagtggcttcaagtcagaagaagaagaggccacgtcttcagcctctccttaagcatctatcaccagccagctgagaagatgtgactgtcatcctcccaacccgacaagatgatttttctcaaccataatacaagcccagtgagccatacaatcatggtgaatcccctatcagctcaacatcctatgcaatttttcagagaatatgattctatctgaaaatacatgcaacagtctggaactcatttttccccagtgcctaactttcagattcctataaataccagatggccttccaggcagtgacacacgttggaattatcgaacaagcatcgcttatgactttgccttgggcagtgtcaaaaggtactgagaatttacccatctcattacggcgttgctaacagggtctcaggcagtttgctgggcctggaggtgtgtcaaattgcagtgccatgaatgcctcaaacgagagacagagaaagagaaagagaaggaatatgtgaatgtgtgtctgtagctgagggaaacaacaagagtaaagggaattaaactcttttaataaaggaaaatagttttcaaacaaagaaaaagaagtctaatggttagctactgctgcataacaaaatttccctaaaactgagcagtttaaaacagtatacatttattatctcacattttctgtgggtcaggaatccaggcagagctcagctgggtcctctctgtcagcatctcacaaggctgtaatcaagatgtaggccagggtgtggtcccatctgaaggcatcactggggaataatatgcttctaagctcactctcagggttgttggcaggactcagtttctcaggggttgttggacagagatattagctctgaactattgaccagaggcatccttcagtcccttgccttgtgagtgtcgctatagagtgtctcacaacacaccagcttgcttcatcagcaagtaaatgagagggtaagagaaagcaccagcaaagagagaatgctagcaagatgaaagccatagccaagcatggtggctcacatctgtaatcccagcactttgggagaccaaggcaagtggatcacctgaggttaggagtttaagaccagcctggccaacatggtggaaccacgtctctattaaaaatataaaaaaagaaaaaaaaatctgggcatagtggcggtgcctgtaatcccagctattcaggaggctgaggcaagagaatcacttgaacccaggaggtggaggttgcagtgagccaagattgcaccactgcactccagcctgggcaacagagcaagacttcatctcaaaaaaaaaaaaaaaagccacaaccttttgcaacctaatcttggaagggcgtctcattgcttttgccataatttttttttttttttttttttttttttttttgcccaagctggagtgcagtggcatgatcatagctcactgtaacctcatattcctgggcacaagcaatcctcctaccttagcctcctgagaagctgggactacaggcacgcaccagcacacccggctaatttctaaattttttgtaaagacaaggtcttgctatgttacctaggctgttctcaaactcctggcctcaaacaatcctcctgccttggcgtccaaaagcaatgggattacagacatgagccactgcacctggcctgccataacttatctttagaaacaagtgtctaggtccagtctacacttgaagggaagggattacacaaaggaacgaatattcaaagacagagattattgagagccatggcaaggcctctttccacagaaaggcttcagaaaattatgatcagagcctctctcctaaggcctggaacataagagtatctgggatattcattcattcattcatttttcaaaaagtatttaatgactgtctgctatggaccaaacatttctcgtctagtccggtctagtctagtccagtccagtccagtccagtctattcttctattctattctattcttaagatggagttttgctcttgttgcccaggctggaatgcaatggcgcgatcttggctcaccacaacctccttctcctggattgaagtaattctcctgcctcagcctcccgagtagctgggattacagcatgtgccaccacatctagctaattctgtatttttaatagagacagagtttgtccatgttggtcaggctggtctcgaactcccaacctcaggtaatctgcctaccttggcctcccaaagtactgagagtacaggtgaccaaacactattctaaatgctaagtgaacaaaggcagaagtgaacaaaacatacaaaaatccttgtcttcataaaactcatattctaatggaaggagaaagaccgtaaatgggataactagtgtgttggatggtgataacagctatagagaaagcaaaacaggaaagggaatgctggggaaggggtgggggcacaggttgaaatcaacaccacataggaaaggctccagtgagaaggtaacatttgagcaaaatcatgaaacaggtcaagaagctatcacatggttgtctgggggaagagcatttagacagaagctgcagatgcaagggtcttgggacaggagaatgaagccaggggctgcagtggagtgacaagagtagtaggaatacgtgaacagaggtgtcatgggcatatcacggaaagcctcataagcatttgtaaggactttgttttttattgcaaataagatggaaagctactggtggggggtggcctgagacacaggagtgatataaactgtcttatagcttaacaagtctcctcttgactatggggtggaagaccaatgtcagtggggtgacaagggcaaaatgcaggaattcactgaggaggctgcaggtctactctagatgagagccaatgatgacgtaatctggggcagcagcacaggaggtgggtaggttggcttctggatatattttggaagcacagcctaaggatttgctgatgggttagatgtggagtgtgaaggcaagaaacaaagaaataagacatagttctaatgttttggccctagcaactgggagaacagaattgaagattcgtttaattctaaacgaagtaaagaccaagagttcagttttggaagtggtagaaaactagggtgatcattagatcaaagttagaacctctgaaagcctcggccctgcatctgggtgatggaccgtggtccacacagcacactcgagcctcagtttcttcactgtacctgcaagtgcctaacacctcctaagtcccacatttagccagcagcccatccctgcgcagtgggaatctcggctttacacgttatgtgcgcatatcatattactgtacaataactcaagtcttgctatataggcacatcataaaactattccaagaggatagattacttgaaaccagcatttaatgtgcagctattacatgccaggcactatccaacgcactgctcctacgttatccacatgcatacacaggcactgggtgtcataggatctctagcagtcagagactgtggctctcaagctccttggcagtaggctgtggtcatctttcccacgtgtgcctgtgtttctctgcattaagattttcagaaatgagggccatgtctgggaatctgtttactactgcagttatgctgagccagacagtctctccctgtaaacttgcagtgatgggaacctcatgaccccataaagcagccccctccaatgttacagctagttctcagaaagtctttcccttttattatcagccaaaataaaatcctatagtttctattcattggctccagttcaccttgtggagccaccagagaaaatttcccctgccttccaaatcacaagctttcagagagttgagagcagctcttcaatcttcatttgacactgatgagaagagtgccagctaaaatctgagacatactctgtgaatcacacttggtaaaagtgtttttacaaatattatcccattcaccatccataatcactgaagattaactgcgaagtatcatttagctatcacttctaaatgggagaatgaatgggaaaactcttggaaaattttgagataattacactctgtatcattgttcccattctgcagatgagaacacaagtgactcagatatgctaagtcacttcaagattacctttaagtaactagtgttaaaagataatcttcaaaacataataaaatcatgactcatacagatatgaaataaatatgtgttaaagattttatcatcaatgatttatcaaagatcttatcaatggatttctatcattaattaatgaagattagaaagatgctacaagtggtttaaaagagaacccaaagaacagacagctaacagaaacatttaaatgggtgtacgaatggatgtaaaattttttgagggggaaggttgggtagctcagttgaacctctactggacaggatggaatgtgcatatcagtatctgtaactcataaaactgtaaaacagtttccataaaatcaaaatcagatacccaggaaggattacccctagagtctagagctagacaattactgttttccaccgaagcaccattttctctcacagcctagcatagctagggtctgcacatggttctttataactctttgccctctaagaaaatctgtttaaaacattcactgactttttttcaggcccaatcataatatagatgggccttcagtggctggcaacatatgagagaaggagcagaggcactgaagaagaaagagtttggcaaggacagttaagttcctgcctctctgcatttttccatgtcagtaagagcctttcccttcctctcttccccagcctgtttctcacttaataaggagttgtgcagggtatttccagcctaactccctcccccccatgcttgctagagagtgctccattgtgcaatgaaagaaggtaaggagttatgcatgtttttggttttactgaaagtctatagtgtttcaatagtctctttgttctctctctcaatagttcctgtgtcttaagaaattacaaattttcattcttcctatggcattagtagtttggaataaaaaaggaaggaaagaaaagaaaccaattaaaaaataaagtgcttaggcttaagaacagcatttataataacttcacaggtctaacctgcacttactggcggcagtttaaacagaaggttccttgagaggtgagcaataaagaagccatttagtacttgatctccagagagggttttatcaattcacttgcccccttaaccatcactggtttctgtgtaatccatagaaagatgagacaaaccaaccaactcgctcacatttgcatgggtcagacctcttattaaatgagttttccccaaatggcagtgcttagcatactctgatggcaaatgcttaaacatttcgtcaatttcaatgggatgtcaatttcccctgccaagcaaggtggccttccaggctaatctggggtgagggaggggagccaattccaaagtagagaatgattctgaatacatacagctttaattccaggtttgctcatcactcccgccatctcagcccatgcttctaccaacactggctcagaagttggaaaagatggagattgtatttctgttagactgagaggtggagcttgtctgtcttcccccctccttttcctttccttcttgagggcaaggcctatcttgttactctctgtacccactgtctcattcagtacctggctcatagttggtgttgagacactgttttttcggtcaaatggaactaaatccattgttttgtctttttcattccttcatctactatttacttgaaacttactagtttcaagttcaggttctcagctaagagctggggccatggcagtgactcaaacaaggtttttctgccttcaaagggcttatattttagtaagaaaaaaagacactaaaaaatgagtgaataaatgatattattattaatgatagcatttcaagtacaaataaggactcagaagtaaaaatgtagggtaaaatgatggagtggtagttttgacagggaagataattcaccttaccttcatctgtctatctaataaatagataaatagatataatcttatccattcagagggtacctgttggacagaaagatgatcttcccactcaacaccactattctgtcacccactgagagcaatggataagaatagactagaatttattgagtgtctagtgtgtgtcagccatggtgccaggcttttaatacataatatctgatttaatctttaaaatataatccccccaggagatagtccttattactttagttctaccagtgaggatacagaggctcgaagtcattaaagtaccttatctgagattacctatctatattgcctgatgtctccacctatggtggagccaagatttgaatatagtttcttctacctctgaaatgcacactttgtatgttatactttactggctctggacctgaggcattatgccaggtattctgggggatgtaaaatgttcagttagcagcctttgatgttgtcaaagagctcacaagctcactggggaaatgagttgtattcgcatagccataaccaaggaaaagaagacatgtatttcaagagagataaaaactgatgggctagaatgaccagaaaagcaacatgaaagggtaaaatgaatccaaaaagacaggatagatatgaaaatcagagatgaagttgaagaggagatgggagactgtttatacattggagcattgacagtgtgttaggcacgtgagtgatacagtcatatgtgatgtctgctcttaggtgggggaaaaaaaaagaaaaaaagctcacacctagctcagacacaagggaaccagaacatgatgtgcatctccctggggaagagtccagagagccacagtatgcttagcaaataaaaaccccaccatatggttttatcttcccatgaagctgggtacatttcagcacacaaaaaaataggatttcagctgggtgcggtggctcatgcctgtaatcccggcactttgggaggctgaggcaggtggatcacaaggtcaggagttcaaaaccagcctgaccaataaggtgaaaccccacctctactaaaaatacaaaaaaattagcaggatatggtggcgcgcgcctgtagtcccagctactcaggaggctgaggcagaagaatcgcttgaacctgggagacgggggttgcagtgagccgagatcatgccactgcactccagcctgggcgacagagcaagactccatctcaaaaaaaaataataataataataataataataagacttctgttatgcggttctaccttgagttccttaaattccatagattttattcctaggtaagtctggtcctcagcaaaataaaagtggagaaaaaagcttcaaagcccactcagctggaaacagcttacctctcagagctgcagtttcctcatcaatgaaataagatggtgattcaaaggattcaaaaatcattaagattaagagatgtcatcaggcaaaggactttgcatagtacctggcccataccagatgctcaataaatgtcagttccaatctccctccccttgactctccttttctgtaaaatatacctggtcatctagaaaatttgcaattgtcttgcctcttccctacccctttttcaatacagatattcaatgggtcataaagtcctactaattttcctgttcaccgtttcattcacaaatagtccttcttttcattcctctgactcctgatctagctcagttgctatggcttcttaacctgactccacgctacatgtttgtaccctcccgtccttctgggccccagatcaaccatcctaaaacctcctttaatgatgtcactagtgagacagcagaaagagagagatgggacttcaacttcacaggctgttcttagatgcccaggttggtcgtgaactccttgaggttaggaaaggaactattagcaaaatggaacatcctccaagtagaaaattatgctgatgtcaaacaatttcatgtagctttaatggatgagaggcaacatgatattgggcatgacatgcttaaaaagcattgctttcagtggcccagaaagtgtcataaaagaggccacatcaaagtagctcttctttagcacattacaattgagaagtcattcctcccattaaaaaaaaaaagcaaaatgcaactctttacaagggataggggtaggagaaaagggttgagcccggaagaaagaatactcaggctgcagaaacactatggctgtagttggagtgaaatacaggccacccagggggagctgctgtcctgtgaagtccactgatagaaacccgattcccaaaatatcatgcagtatctgcagatgcccagctcaaagacatcctgaaaatagtacttgttatgccatgtccatactggctggctgggtcaagaggaggatggggcactgggcaaccaacaggaaaggtaggtcattttaacacccaacccatccgcagtttccagagaagaacatatacaaacaaatgacacaagtgtggtatttctagacaggatatgcactgggcttaaatttcttttccctatggaagccttccccatccaaaaacagaacaggctgggtaccccaccacgtgttcttactacacttcacattcatagcctttattgtttttgtaattgtctagatgtttatctaaagtctgtctcctcacactagactaagagtgaaaggagagcagaagctttatctcgttctctctcgtatctctggtagtcagcatggggcttggcacttggggaacatagtatgggcgtatgattgctggctctgggtttacacaggctaagttcaaaccctatcttcactaactgtggctaaatgacctttagcaagcggccaactcttccaagcctcaatattttatcctcgaaatagggatattgatggtactaaccatcaagttgatagaggattttaagaattaatacatgtagaatatttaggtattccccagcatataagaagtgttcaataaatgtctattattattaactactttggtcaggactccataaatactcattgaattaataaagaaaagcttacactaattgcatattaaactctgcaacagagacttggcatccacagatgtcaatatttagcacttccactttgcatgagaagggccaatcgtttgttgtcatttacagtttttttgtggaaaccatttcactcatccatttatttagatcaaaacccaaacgcaacttgaggaaaagagtctttcaacaggggttcacacctcagctaagactggcattccaagaatatccaggcagacagaagccgagttgcctggctgccaaaaaggctgaggttgggaaaatgtcacagtgtggaagatgtcccgagaagtcccaaacactcaatggatatcatcccagggcagtaagatcagagatcatcagctcctggaagtgacccatccgctctaaagccaaccatttttggggattggcttgtgaagggatacgcacgcagagccttcgggtcagaagcttgtgcccaatgcctaaagttgagcgggtgcagggaagcttgacctaatgagaagagctgtccactgaagactaagttactcttacttcccctcccaggtgccaggcatgagcagcagcagcctctcctaggacacccctacccccgagtggcttcagtcctctggaatgatgcaaatcaggcacagggatgaggaagcacagcctccaactcagcctgaatctttcactttcctacaaccccttcttcctccatgagggatctgaagccatctgcttcaccatacaccatccagttaatctcgttcaacatatagttcacctcaacaaaccttcctggggcagggcacagtggctcgcacctgtaatctcagcactttgggaggccaagacaggaagatcattccagcctgggagttcaagaccagcctgggcaacatagcaacaccctgtctctacaaaaaaactgaaaaacaattagcctggaatggtgacgcatgcctgcagtcccagctacttaggaggctgaggcaggaggatcacttaagctcaggagctcaaggttacagggagctatgatggcaccactgcactccaacctgggtgacagagcgagacactgtatcaaaaaataaaaataaataaataaataaacaaacaaacaaacaaacctccttgaaattaagcccccactgcccagaaaagctctgtgtctttccacctccagtaacaccttccacattcctgggtccactatcttgccactgagtcatgaagacttctgagaaacacacaagggagagcagagaaaacatcacagtttaggattttagagccggggggcggaaagtgcttctgctggaatttctgtcttcctaggcagacaagcaaaggaaatgccggcttccacatggagaggaatacaagaacctgcaaactgctcttcctatcccactcacgaagctctccaaaccgttcttcctcccaatagcagtgacactcctggaacaaaaatccagtcacaccagtgcctgcactggcctccctttaatcctggaataaaatccaaattcgttgagatggcccaccaggcctacctgaagagcatctcaattctattcctccaaccttacctgcagctactttccacttgctgttccctggcctcactggtcttcctacagctctttgaacaagccacacgttctcccagcccagagcctttgcacgtgctatgccctccacctggagacctccccacttttcacatgaccaagagaaggaggtaccttctcttccaccaggtctcagtttacatatcgtctccccagagaatctgtcccaactaccgtatatcaagtccacagttgaagactatctgcattaagcacttggttggttttagtcccagtatttattgtaatttgcaaatatgtgtctgtgatatcttacctcccagtggtatatatgcttcatgaaggcaaagaatattgttcatctgagtcggtgtttgttccctgtgcctggtacatagcaagagctcaataaactcactgtatgaatgaataaacccactccacatttttatggataaaatgaatattcaccagtgtcatttgtggccagacattataaaatgttgtgtgtgtgtgtgttatatagtatttatatatactatatattataaaatatgtaatatttatataaaatatgtgatatttatatatatactttatatattatgtaaagataatatgtatctttacatttattataatgtaactctaaagatacatatatatgtatgtatgtatgtatgtatttatctacaatgatctaggcctcaccggttccattttgcaggtgaggaaactggagtgtgagaggttaaataaattgcccaaaggcacacagctaataaatgacagctgtttgacttgtgccaccaccaatcacagctctggatagtttatctctgttctggaactaaaggcatttaaatccggccactgaggaggatttaaccatgtctgccagggcgtctgctgtttctcccgggactaatctgccatgaagcagatgcaaagcttcatttatcacttccaacaaaacatggaagagacaaaaccccagcggatgctccctgcttccagtgtccaacagggcagggcttgtcccatcagggcctccaaggtgcctgtttccctgaggaagggcccctcctcccatgtcaccggggtcactgccccttgtgctggacccagggctctgtgctctgcatcagaccagctgagctgctctgtccactggggtgcttcgctcttaatgaggtaaaattcccataacatagaacaactattttaaagtgtacaattcagtggcatttggtacattcacaatgttgtgcaatcacacttctatctagttgcaagaccctttcatcaccgccagagaagacccccgacccattaagcagtcactccagttccccttccccagcccttagtaaccaataatctgccttctgtctctatggatctgccttgtctgcacatttccagaatcatatcatatacatggaatcatacaatacgcaaccttctgtgttgggcttctttcacttagaataatgttctagaggttcatccacaatatagctgggatcactatgtccttgcaagtttgggcccctggccagttagagatgtcgagtcagagagcagcacagagtacagagctgatagccagacttttctcaacctcctcagacccactaagaaatggggacatcggaatcattgcacctggaaattttctccttctgcaacaggtgggcaatccctggggggaacttgcccccaaacaatgaatcaccctgaggagtgccacagcagatggcagggcctgaatgtggaccagacccattgaggacaccagagtccagccctggccagtcctgggaggtccaatactcacaaagagaaaggaaaaaccttaatatttacatacctgggcacttttgctaaagaaaaccaaacccagaaatcccaagaactaaccaaccccaaaagtttaaattgtgctgtattttaagtacaacagattgtgatctgacctcactgtggcatcagcaaaagatgttacatacatgacagagggtcagaatgttatcagttccttagacaggggccctgagttgtcactataaatacaaccattagattatctggcaaaaaattcagtctcagcacaaaacacccattacttcctagtgggagtatcagcaacatgtaccatatatactggtataattcttgccctaaatcttcccttctttcttcactcaatgtcatggcaacttccatccaacacaaaaacagcaggatttacaacggggtttctcaacttcaatcaccgcactgttgacattttgagcaaggtatttgccctggggttgtcctgtgaattttagaatttttagcaacatccctggtctctacccactagatgccaggatcacccctcccacagttctgacagccaaaaatgtctccagacagtgccaaatgtcatctgagggtacaacatcaagaaccagccacttcgattcaggtcaaagagagcggctacagggagatttctgactgaggttgcatgagaagtgcaggtatgggattttgagccgtgcttccaaaattaggtgaattagaatcaactctgaattttccaggggccaattattcacatttccccaacccctgtgcccgtactacctgcattccacccaattcccagccactcacaggcagctggcatgatgggagagataaagaaatttggaatcaagaatgcaggcttacaggaaagttggattattttgttttgtttagactagagagacttgtgcttgttaaaatgcaccctccttgcatcttgcaaagtttcaatgctgcccaaccttcccccagcccctggcagcagagtcactgaagaaaagggaaggggtccccttcctctcatctctggatggcaggaattctctcctgttctccatagagcagggaaattctaatgcttcccctctccctccagaggccaatctccttcaggcaaatagacaaggagagaggtcttctctgggggaccagaccaaacaatatcgcaatgtttgagggcacagaagaacaaaatatacacaataagagaaagcctcactttcatattacagtaaataaactttaaaaatctcctcaatgtctctttcactcaagcccttgctccttttctttcctcccctgcacaccaaacttcttgcaagaattgtgctcattcactttgtccaccctcatacctttcactcactctccaatccagtgcatgaggccaccccaccccaggactcccggaaattgtcttgccaaggtcactgacgagtgtctctaccttgtcactgaatctaatgaccactccttcatccttatctaggatgtaaaatccatgagaacagggaattatgtctgtcttgtccacttttgtatccctagtactagaacagtgcctggcacacagtaggtgctcaatacatgcatttgttgaatgaatgaatgaatgaatgaatgagtgaaccccacttgacttctgcaaggtatttccaatgctgaccactctctccctcttcgtatccttcccttggtttctagaaagtgacatgccaatggttttcctcctacctccctgaggactccgtccatctcagcctctttatggtgtctgcttccatggctgatccatgagatgctcttcaaggccctgcaccaggaccccttctcttctcactcaacaacagccttttcccagactatctcatggcctcattaccacccagggagggcagtactgtttgagctgccctacaccttatcatcatttgtatctaggaacacccggttcatcctctggagaactaccccttcccactccagcctgccccaggtatgggcacatatctcagagttggcttctcagagcctcacctgcccctggcctgagtgaacagctcagggatggtcatgtggcccaatacaagccaatgtaagtgtggcccaggatttgaatggttggtgatgaaacttctctcttttccagtgagcttagagaaatagggatttggccatcttgcttccctaaggaaagagtgcatccaggagttcagccagctcacacaaaaaaaaatgcaaagtgaagagataagacagagagagagtgaaagatctgaaactgatgacctcatgtgagtccttaaattcagtgatgcttgaaggaccccaccctagaagtttccaagtaaatgacccaatacatttactttttgcttatgccattttgggttggagtctatcatggataaccaacaaccccagctagagcgatgactgccacatctgtatcaccaggcctgattcaactctgagcatcagacccacgtatccaattgtccatggacatttttatgacctctgccaaatggacaggctgctgggaacacgttccatgaacccaaatctggcttgattaaaagagctgctcaccatgtacacaaccaaccccccatgttgtcctcatcccactgttggatatcctgccaactacaaccctattacaaatgttgacttcctctctactatgatatcatcccattgctaaaaacagaaacttgggatgcttcaacggggaaacttatctccaagatgtctgccatcaattctttgcctccctggacatgcaagtcattctcagctaagggctgagctagggcctattcctactctccctttgcatctgctctggccttagttattttcttccccaatagaacgcagtagtagtgatgttctggaacttctgagcctaggtcataataaacttcacaacatctgctgccactgaagaagttggtctattctgaggtggccatgatggaaggaagcccaagctagccacaggaaaaagccatgtagagacagagtgcaatgtcaactaccctccagctattccagttttctcagccctggtgctagtcatgtgagtagagcaaccattcttggatattccagttctagcaaatgccacttgaagaagaagcaaggttccagttatatggattcatttgagctggccagccatttttgcctttgatccaccccagcgggagcatcaaacattatggagtggagacaaacttttccaatgtgcctgctccaattcatgacccacagaatcatgaacacattaaacagttgttggtttacattattaggttttgaagtaccttgttatgcagcaaagataactgaaccactcagctattttttatgtttgccaaaccattcctgaaatctacccaaaacaaaacactactttctaagctcaccctggccagaaaaaatctctattgtagaactgagacaaagttattgatttgcctgtctttctcccttaccataccttgtactactccagggcttggcacagtggctggtgctaagacatccagtatgtatccaacgaacaaatgaaaggaaggaagaaggcctgagtgccactgccctccatgaaaatgttctgtgagtcctagaactaaccgtgtctttgggactctgtggcagcaaagcggtactgcaagtgttattataataacagtgacagaatccaagcctagtaatcattaaccatccccaagagagctagttagctagcaaagaagaaagccccctcctcagggttgggagcactggtgccctgacggcacttggcttcaaactgaactccccacgccttctcacagagctgatctgtctataaaattggtggtttctatagaaacagaagcactgtagtaaagtgaagggaaatcgtacattctgtcagcgtacagagatcaatcctgttcttatatggggccaggactctttcacgctttatttttgagcatctcaactttcatttccatcccagccatctcatctcatatttatgaggctcctgcactggtaatcctgtcccttctcacctagctgcctttgttaactacgaccatgggcagaagtctgtggaaacagcatggaatccctggcatcccctcgtagtgccaatagctccaaaccccaacctgagaggcagaactgggatccctggtgttctggggtggtaaccaagatggtggacggagtcactacagaggaggcaccacagccttccacctagacattataaaaatctactctgtaattgggtacgtgttttacatgcctataccttagctttagacagtctccatgcccttaaatattaatatgtctgcaatctctgttttgcaccccaaagtgcaagtggctttctagcaggcaaggaaacagagtttggcttgtatttgaattgctcatgctgtctctgatcatctacagagaaaattagaaaaggcacaggttatattttagtattttagatgaaggtccaaattttgaggcacgtgttaactcatgaaaattgtctgcttcaatcaagattcactcttaaaataagaaataatgtgatgttttcttcatcaaagagcacttttatttctgacctaacagcactaaatgtattttgcctttttcctgttctaacaaatgactggttggatgaatagaaataaaatgatagatggatgagagaatgaaggatggatggagggatgcatggatgggtattaatcgtggatgtgtggatatatgatagatggatgggtaaacaggagatggatgaatacatgggtagatggatgggtgggtatatggatggatgcttggattcatggaggggtggatggatggatggagatgaattataaatgtgtgaatggatgatggatgagtagatgggggatgagtggatggatgggcagatgaatgggcagatggatagatggacagacaggagagggatagatgaataaatagatgggggggtgggtaagcgagtggatggatggatgatagagaaatcacccatcagcataatttttctaagatgtaaatctaatcatccatccatttattcatttacatttttgagcacctaccatgtaccaggcaagatgtgaaaagcactgaggattcagcactggatatctgagataaggtcccaatccttgaggacctaagatttcaatatctttaaagtagtaaatagattaaaggcaataagagtgggtgcagggagaggagtgcaacatctattaccatgatccaggtgagagctgatggtagcttggtctaggataacagcagtggatacacggaggcagaaatagattcaagagttatcagcaggccttgatagctgactgagttgcacagccctgagtctaaatctcagttcagccacttacacgctgtgtaagcctcaatttcctcagctgtagattgtggataattgtacctatctcccagagttgctatgaggaataaatgagatgaagtatgtgaaagagtcagacatagggcctggccaagaaaatgtttttaacaccaaaagcctccattttaggaaaaggcacccaaatccctgcttcttgaacccgggctatgagctgtgaggaatactaaatgctattagggttaaacagtagtcagaaggtcgagagagactcaaaggcatagcagggcaggatcatgtggccacgcagtgtccagcctacttcctcccctctcccaaggacgcaactagctgtgtgccacaagcctgctccacaccacatgagtccacacgtcatgccaccatggctagccattaaaaccacttcagaagcctgggcccatccatcgcagttggcgcaatcaccaaaattgaactttcatggagccagaatcaaagggctgcataaactaggattgtgtcctcctccatcagaatcatcttgcctctgcgtagctatgaaggacagtgagaacaaaaataagaataactaggcagaactctaagcaaaacagtgcaggaacaaaaagcagggacactggaacagctaggctgcctgctttaaacctcaattctgccacttactagctccattaccctaggcaatctgcacaacttctgcgtgcctcagtttccttatctgtcaaatgggaataagtaccttcttctaggcttatgataactaaggtgtgcaaatatgtaatgcagctggaacaccacctggaatacagtaagcagtatataagtgtttgctctaggtcgacttcatcactgccaagcactaatatgctccagttacctcactgagtacataaatgcactattccatttggtccacatgacaatcctgagaatgggttacaaagcagggggtctggaaatagatctaccagcatcttgctttatgggcagacacagaacctctctgaggctctctttttcccaccattaaaatgggtacaatagcactaacagcaggtacctaataaatgagacggtggattcttttgtatatactcttaaaaaaaatcttaggttggataaatagtccctttgtagacacagatctgaacgcagcaaagccattacctccactttcatgcccttcagctcatgccttaaatgggtttcttccccaccagcctttctctttttaacaacactctgtgccactgcagaatctgcaaagaaaactggaccaggccaacccaaaggaagttctgagggtggaggaaaggaaaccaaatctaaactaaatgacagctcccttgagtaggtatcctgagagtcagcagaggggcaaggctgcataaaggcggggagggtagacagagctgtgccttccaccactgccaaggtctcagctagcaggtgcatagtgaggcaggcctggccatccacagtgtgcagaagactgaggctcagagatgttaagaaatgtaccagaggtcacacagctcagtaagaggtagagctgggattcgaaagcagatctaactatctccaagtgcccctgccatggtacccactgccatccctcggtgaatcacacaagataaaagtataggtgagtctgtagttaagccataacttgttgttcacttgaagaagagctcagatgacctctgttcctggcgggggaagtatcttctcacttccacctgcagttaaccctgtagaatagagtctatcacactcctagaagagcctctggccccagcactcagaagagtcagccatctaaagctgcccagcccgtggagaagctgagccctcccgtttatgtaaaggcagcagaattccaccttgccaatttcttagtctctccagagaggacctcagatgactgagcctggctaaaccggggtttctcaatcttggtattattggcattttgcaccagattcttctctgtttagggggctgtccagtgctttgtagggtgcttagcagcatctctttcctctggatatcattagtacccctttcagtcgtgacaagcaaaaatatccccagaatggccatatatcccatgaagggaaaaatcacttgagattgagaatcactgccctggatggctatatcacagcctgggagataatggacgagtctgggagatgtcacagggggaggagggactctaagacctcccgtgggatggctgaccctggtatagtcacctgagctgagggtgggccctcgactctgcacaccgttagttcaatcctgccagagttgactggtctcagcgagactaactcagtagatccaactcataagaggttgatgtgtaacttgtattccaggctgttgatgtcccaggagaaacagaccttgcaagcagatcagattttcctgttatctaacctgtgccttcttctctagagggaactttggggaagcaaaatcatgataaggctcttgtttggtgagcaggactggagggaggaattgatggaagacttgggtgagtgctctggggccaaatctccctcccctggtccaggaggacagcatcccagcacctcttatcactttctgtctcctacagttaagccatgacctgacgatacatgcaacagtttgcctatcagacagctctgccagcctacaagttccagaaaggcaagcacagcatgttatccacatcttcagcagtaagtgctacatagaagatgctcagtcaacgtgcgtgtttgctttttttttaccatttgcagtcaccttcctaaaaaggaagggtgtgtggggaggggaggaagaaagggaagcaaaagagatttcctgttgcagaagaaaaatggcataaactctagagaggctaccatatctctaatttgacctgagctgagcaatatatccaggatttaaatgatgctggtcactcacttctttctaggtcacctttgtccaaggagacatccttagaatcacaatagtaggagaagacgatggaagaggagaggagagaagggaaaggaggagggaagggagggaaagaagaaaagggtagggaggagaggaagagggagaagggagaggagaaggttaaggaagggtagaaagggaaaagaaaggacaaagagggaagggccagggaggagagggaggaggagttacacagaagctcattccctatggacaacatgagtttaagaaacgccgcacactctatccccctcttagtgatgcacaacacacgttgccatagcaatataaatcatattaatgatcatcatcaacatttattgagcttttactgtgtaccagacactattctacaagcttatctgtattaacaccattaatccttcccacagccctgcgaggcacagatacattaaataacttggttactctaggttactggccagttagtaaagttgcacggctgaaaaacatggcaattcacagaccccacaaggtcctgcattaaaagcctacaatcccagaatttcccacacttgctttttatgtttgttgtcacaagcagcatcttttaacaggctgtggaacacattctggaaagcacagttcaaggacaatgtcggtttggttcaccctactaagtgcatgcctgaggcctcccaagaataagcctcaattgccatgactgaggggcataaccgtaattagtatgattattaacacttatttattataacatcctttcacttgtacttacattattgttccttaagctttacaatttcttcatgagtaaagtactgagattactgtcctcattttccagacgcaaaggctgaggctcacgaagactacctgactttgatccccagcccacaaaccacagtgcagcccaggaacagaggctgaggcagtacattctcacaaagacttcactgcaggggcaaagccaaggcagaaaaagtgagggagaaggagggagggagggagtgagggagaaggagggagggagggagaaggagggagggagggagggagggaggatgaacctatacaaggcagtgcatccccgggccagccacagctttgccagtaaacatcaccgcttgcttgggcacacggcagtgtggaagcccttggccttagcgcattcccttccaggagaggaagggagaggatttatctgctgccttggttcctggccctctggttaaagctttcccccacacacaggtggttaactctattgcatgtacaggttgtgacactcaagctcctccatgcagtcgttggaaaagccagatcctaccccgtagtatggggtttttccaagcattgtctgcccaaacttggtgagacagtttggatgttatcccctctaaatctcatattgaactgtaatccccactgccggaggtgggacctagtgggaagcaattggatcatgggggtgggatcctcatgaatggttcagcacctccttttggtgctctcctcgcaatagtgattgagctctcacaagatccagttgtttgaaagtttgtggcacctcccccagtaactctctctcttgctcctactctagccgtgtgagacacctgctcctactctagccgtgtgagacacctgctccccctttgccttctgccttgattgtaagcttcctgaggcctccccagaagctaagcagatgccagcaccatgctttctggaagcctgcagaaccaggagccaattaaatctctctctttttttttttaaataaattacccagcctcaggtatttctttcagcaatgcaagaatggcctaacacactagagcaccaaagactctgcagctcccacctgggcagaaagggcagaggagactgtgacaaagtctcaccttctcccctaggggaaatgagacagtcagtgttgttaagagtacaggtgacagcaacaacggtcaggactatgcactggccaagaagtcaaggcttggggaacaggtgggccaagtgaatctaggaggcacataaactgagtccaagataccgtttctttgaatccaaaaatgagtgttccttcattcagtggcaaaaagcattcaactcaccaaccaccccagcgcccaagtcacctggatctaaaccacccattggaaatgcagatttctgggccacacccagaactaaaggagtggtttcattgggagattcaaccacggagtctgcatatttttaacaagctctccaagtgacttttgtggtcactaaattttagaaacacctaggacagcatcaaaagctgccctgagcatgccggaactccccagctcatttgatagggaaaaatcgaaacctagaagtgattaactacagatcaataaaacagaacaatgaatcatgccaaaggtcgagtggcagtacgcagcagtacacggcaagccaatctaattaggggccctcgtaaacgtcacctgctcataaacatttataaaaacagatttcctgcatatggaagggtgttaatttttcatatagctgtaggtaaagtaaatgtatttttaatctcatacattgatttaacactgtatttctttttgaaagactgggagactcagtctttgtttactgatttctatatcagagaaactgctggagagagacgccagagcatactttctctcctcaggaataagggaaatcttctgattcttccacattcagactctcccttggttctcagagcccaggctgacatcagatgctacctaacagagacaaatgacacagggtgaggcaaggcatggaagaggggtgtcagttctgcaagggagatgctgtcacttgtaaagattttcattaataaaccttctagtacctactgttgcactgcactgtacccatctctggaaattttttaacaaactcagatttaattttctttctcattaattaattttttattcatctcttccattagagcctaaaacctcccaattacacattattagctcagaggaaagttggtaattgagatggtcccaggattccaggagtgccctgtgcagaatgtctgctttaattagatttccattaattacttttttatcaattaatattgggtactttgggcccaatacttgtgatctccacatcatgcactcttaaatgacacctcatttattgcagtcagtcaagcaagggacccaaaaagagttcagcagagagagcggcagacaggctctgtgcctcacatgcaaatgacatagcatgcttgcttgcaggggtgagtttcatcccctaatgtgtacctcgagaggctaggcaggttaggaaggagagatagagagagggagaggtggggtgggggacagaaggtgggggacagggagagagggagacagggagagggagaaagggaggaagggagagagtgaggaagggtgagaggagaggagggaaggggagaggaggggagggaaggggaggggagggagcaagggaggagggaggggagaggaggggctgggaagggaggggaggggaagaagaaagcaagggaggaaagggaatggtgggaaagggaagaagggaggaaaggaggaagggaggaagggtgaggaggaaaggaggggggagggggaggggagaagggaagaaaaggaaggaagaaaggaaacctacagaaaaacatcaaaagtgtctagtccaatcaaatcatttgcagatagataaatgatggccaggaagccaagtgacctcaccaaccctacacaacattaggctagaacatttttctcccctccacattgtcccctgcacctccctctacccctttactaggggaacacataatttatcatctacactaggacacttttaagagagaaaaggactgctgttaataattatactggggaacaatagacacaaaccccagcacaccaagatgtattgtcacccaacccttcacccctcggctgttaacttatgaacctcctcctgagagagacccactttttcaaggtggcaactctgcctctgcagccttaatatagctcagtatttgcctggaaaatcaatatgcattgattaatgacaataatatgatgcaacctccaccctctgaattcgcttagtattcccactgtctgtcttaaattaaatgtttcagttcacccagtatcttttcccaactcatttctcaactattcttttatagaatgtaacttaattgtactcaataccctaacctaattagattggcctaatggttaaaagtaacccaaaactggactacttgggtttgaacttagtggggtgtctttggacaggttaagttttctatgtgagctttcttatctgtaaaatagtacctacctcatagggttcttatgacgattacatgagctcatgtacgtcaagtgcttagaatactacctggttcatagaaagtgccatgtaagtacttgctaaattaaataaaaataaaaagttagagaaacggtgatcaccaaaagacataactaatttctcgccctaaactaagcggaatatctcaaagtcaaggagaagaaaagaaaaccagatgtgactgaacatagcttcctgtgccagggactgagacccgtacttcggatgcatcatctcatttaattcacagaaaagcccttgaaagtaggtattgctattatccccattttatagatgagaaaacagagattcagagagatgctgtgactggcctccaccatacaataaagccaaatcccctcaaaatccagcacaggtgggacaactggaaaaaaaataaaacaaaagcccagggtttcaggctgactttcaccttctgcttgaatcctccttgtttctagcttccactagcgcctaccccaagggagctctgctcccttctttaaggtcagaacccatgcacaagccattccttggttctgtgaacagctgacactggctgcaacttgcagaaagatttcctaagtccttaggggggagtccaagagagaacaaggacaggagacacagaaatagcccagccgacaatggacagtgccttatcttctggaggggactcactccttaccagggacctcgcaagctcatctcatcccatgctcaggttcctagaacaacatcactctcacctccaagggctggcccccttttcagacaccttgtccctcccatcatctactcacggagtgtctgggtccttaggtgacaatgagcaagtctggactctgaccacccaacctatttactagctactaggaactccctcatatacagtcaccaactagatcatatgtcaattttaataaatattttcactgatttattagtccatttctgctgatacaacaaaataccttagactgggtaatttatcaattgtagacgtttatttttcacagttctgaaggctgagaagtccaagatcaaggtgctggcaggtttggtgtctggtgagagcctgttctctgcttccaagatggcaccttcttgctgtgtcctcacagggtggaaggggagctggaggacctaacaagctccctctagcccttttataaaagcattaatcccattcatgaagacggagccctcatgacctaagaacctcctaaaggccccatctcttaatattgttgcattggggattaagtttcaacatgaattttcaagggatacaaacattagaccttagtaatagcaaaatatctcatgtagtcgcattaatagaagtaccttctctctgggtatgtgtagtcgccagcctgcatctgtcactgtttcctctccccccagtattgggatcacactaggtacatgcacacaggtacacacacatatacacacacagcccttaagcaactgggttgctaaacaaccagcaggtaatacaagcagcagctgccagagtgatacaacgatgtcataaacagcaccagagcagagagtaagaagcaccctaaatgattcatttccctatgttgggagaatatacccagacaggtatagctgttcccatttgtaaatcactaagaatgaaaaactataaccaatatggggcctaggaagatattttgtaaattaaataagaatgaagtatgcagaaaatgtatatttttctaagatgatttattgtatgaaacgccattaaatttcagactatctgttttgtgttcataaattcaagaaaacctggtttccatgaaaaacaattctttttttaaaaaaatgagataaacagataaaaagagatctggttttaaaagctagaaaaaaaatgaaggtaggtaattaaaataaagaaaagcctgtttgaaatccaattgttgataagaagattttaatgctgtaaggagcacagaactgtggaatacagaagcagcactgtgtacaactttccataaatgaagaagaaaagaaggtggtgataaagattgctatggtgcctgttggtgctccaaaaacataaaaccttcttttatccctcattccaagcagacctccatattgtgatacccttactcagagatgttggatattttagttattatgcacaattgcgtgctggttcaataaggaaaataggaagtaagtccttaaaaagaaagattatagctacatttcactggaaggaagtagaatgagtgtcctcgaacagaggaaaaggttaacacaatgttattccacatcacagacgcttcacagaaatgagcaaagatgtggggtgtgcactcctttagggcaggggagaggaaaagaaaccaactcaactgccttctaaaggaagagcatgtgggagggggcccccacactctccagggaggggtactgtggtcagttgaatgatgggcccctaaaaataagtgtccacattctaatccccagaacctgtgtatatgctacctcacacagcaaaagggactctgcagatgtaatgaagctaaggatcttgagtgatgagaggaggctggattatccagtgaggcccaatgtaatcacaaacgtccttataagtgaaggagcggggcgggagggtcagagaaggaggcgtactgatggaagcagagactggaatgacgcaaggccatgagcccaggaatgcaggtggcctctagaagctgaaaaaggcaaggaaacagattctcccctacagcctccagaaggaatgcagtcctgctgtcaccctgctgagtttagacttctgacctccagagctgtaagagaacagatctgtgtcggtttaagccactaaatttgtgttaacttgttacagcagcagtaggaaactaatacaggtaatgtatccaaaagaagagtagagaatgcaaaattaactctcagctcctacaccttctgcctagtttatagggttgatatcttcctatcattagttgaggcattaatgttgaacaacataataaatgcagaatttccatagagagttcaaagagcactgaaactttagcatactgggtaagcctgttgttacaggtaccagtgcagacagaaagctcccaataataaaatgaccaggagtaaattagaaatatgaaagacaaaagagatatgttatagggatgaaaagaatacctaaattacaaaaaaaaaacctttagaacagatttaaaaataagctacactgaatgtcctaaacatcctgaataacatttttccaagcatacaaaaagaaaaaacaagacatttacatggataaacatttatataagtaaatgactgatctcagatttctttacaatactgggctgaaaacgctaatgattaaatatctgcaggatttaaagcactctgttcatttatggaagaagcagaaaagtatttacaaatgtaaaaggactcagaaaggatgtacagaaacactaccaccaccatttacctcctccctctgccaaatactaaaagaaatgcct
